United States Patent Application Publication US 2022/0211063 A1 - sequence listing, part 4

SEQ ID NO: 7 - DNA, 8606051 bp, Penicillium roqueforti (residues 5,163,634-6,884,844 of 8,606,051)
  misc_feature (89140)..(89587): n is a, c, g, or t
  misc_feature (91419)..(91649): n is a, c, g, or t
  misc_feature (329894)..(330030): n is a, c, g, or t
  misc_feature (430781)..(431112): n is a, c, g, or t
  misc_feature (461664)..(461680): n is a, c, g, or t
  misc_feature (496398)..(496577): n is a, c, g, or t
  misc_feature (532001)..(532095): n is a, c, g, or t
  misc_feature (539751)..(539886): n is a, c, g, or t
  misc_feature (569534)..(569738): n is a, c, g, or t
  misc_feature (649051)..(649187): n is a, c, g, or t
  misc_feature (691112)..(691174): n is a, c, g, or t
  misc_feature (866526)..(866690): n is a, c, g, or t
  misc_feature (1032440)..(1091839): n is a, c, g, or t
  misc_feature (1092526)..(1092737): n is a, c, g, or t
  misc_feature (1210194)..(1210406): n is a, c, g, or t
  misc_feature (1240552)..(1246824): n is a, c, g, or t
  misc_feature (1247751)..(1253683): n is a, c, g, or t
  misc_feature (1258302)..(1372301): n is a, c, g, or t
  misc_feature (1374135)..(1374543): n is a, c, g, or t
  misc_feature (1457542)..(1457828): n is a, c, g, or t
  misc_feature (1505355)..(1505527): n is a, c, g, or t
  misc_feature (1513226)..(1513388): n is a, c, g, or t
  misc_feature (1624048)..(1624249): n is a, c, g, or t
  misc_feature (1669160)..(1669365): n is a, c, g, or t
  misc_feature (1761186)..(1761412): n is a, c, g, or t
  misc_feature (1817726)..(1926025): n is a, c, g, or t
  misc_feature (1933126)..(1933376): n is a, c, g, or t
  misc_feature (1963938)..(1964315): n is a, c, g, or t
  misc_feature (2150469)..(2150567): n is a, c, g, or t
  misc_feature (2196699)..(2196907): n is a, c, g, or t
  misc_feature (2250693)..(2250749): n is a, c, g, or t
  misc_feature (2391495)..(2391786): n is a, c, g, or t
  misc_feature (2493532)..(2493763): n is a, c, g, or t
  misc_feature (2532138)..(2532415): n is a, c, g, or t
  misc_feature (2536284)..(2536525): n is a, c, g, or t
  misc_feature (2786532)..(2786788): n is a, c, g, or t
  misc_feature (2859489)..(2859780): n is a, c, g, or t
  misc_feature (2873900)..(2875004): n is a, c, g, or t
  misc_feature (2881521)..(2881826): n is a, c, g, or t
  misc_feature (2897075)..(2897253): n is a, c, g, or t
  misc_feature (3050650)..(3051374): n is a, c, g, or t
  misc_feature (3057165)..(3057416): n is a, c, g, or t
  misc_feature (3069515)..(3069890): n is a, c, g, or t
  misc_feature (3075746)..(3076120): n is a, c, g, or t
  misc_feature (3305143)..(3305240): n is a, c, g, or t
  misc_feature (3318429)..(3318753): n is a, c, g, or t
  misc_feature (3502740)..(3502854): n is a, c, g, or t
  misc_feature (3538027)..(3538610): n is a, c, g, or t
  misc_feature (3783442)..(3783656): n is a, c, g, or t
  misc_feature (3992300)..(3992418): n is a, c, g, or t
  misc_feature (4005200)..(4005463): n is a, c, g, or t
  misc_feature (4027390)..(4027590): n is a, c, g, or t
  misc_feature (4058485)..(4058631): n is a, c, g, or t
  misc_feature (4267325)..(4267362): n is a, c, g, or t
  misc_feature (4352819)..(4353281): n is a, c, g, or t
  misc_feature (4361818)..(4361970): n is a, c, g, or t
  misc_feature (4393748)..(4393981): n is a, c, g, or t
  misc_feature (4451480)..(4451617): n is a, c, g, or t
  misc_feature (4461509)..(4461755): n is a, c, g, or t
  misc_feature (4481215)..(4481333): n is a, c, g, or t
  misc_feature (4533880)..(4534017): n is a, c, g, or t
  misc_feature (4590140)..(4590368): n is a, c, g, or t
  misc_feature (4668962)..(4669294): n is a, c, g, or t
  misc_feature (4737136)..(4737230): n is a, c, g, or t
  misc_feature (4766758)..(4766955): n is a, c, g, or t
  misc_feature (4834538)..(4834845): n is a, c, g, or t
  misc_feature (4927504)..(4928077): n is a, c, g, or t
  misc_feature (4945086)..(4945236): n is a, c, g, or t
  misc_feature (5082742)..(5082890): n is a, c, g, or t
  misc_feature (5112783)..(5113504): n is a, c, g, or t
  misc_feature (5314860)..(5315053): n is a, c, g, or t
  misc_feature (5372796)..(5373223): n is a, c, g, or t
  misc_feature (5459177)..(5459288): n is a, c, g, or t
  misc_feature (5480488)..(5480661): n is a, c, g, or t
  misc_feature (5535630)..(5535644): n is a, c, g, or t
  misc_feature (5567778)..(5567917): n is a, c, g, or t
  misc_feature (5599006)..(5599219): n is a, c, g, or t
  misc_feature (5727051)..(5727129): n is a, c, g, or t
  misc_feature (5743562)..(5744030): n is a, c, g, or t
  misc_feature (5807724)..(5807810): n is a, c, g, or t
  misc_feature (5920056)..(5920734): n is a, c, g, or t
  misc_feature (5922048)..(5922354): n is a, c, g, or t
  misc_feature (5942930)..(5943209): n is a, c, g, or t
  misc_feature (6011395)..(6011690): n is a, c, g, or t
  misc_feature (6325216)..(6325534): n is a, c, g, or t
  misc_feature (6397626)..(6397737): n is a, c, g, or t
  misc_feature (6604883)..(6605053): n is a, c, g, or t
  misc_feature (6843817)..(6849568): n is a, c, g, or t
  misc_feature (6859923)..(6860563): n is a, c, g, or t
  misc_feature (6915280)..(6916067): n is a, c, g, or t
  misc_feature (6919371)..(6924241): n is a, c, g, or t
  misc_feature (6950690)..(6950826): n is a, c, g, or t
  misc_feature (7010241)..(7010478): n is a, c, g, or t
  misc_feature (7088835)..(7089058): n is a, c, g, or t
  misc_feature (7281128)..(7281307): n is a, c, g, or t
  misc_feature (7435487)..(7435612): n is a, c, g, or t
  misc_feature (7580177)..(7580497): n is a, c, g, or t
  misc_feature (7598174)..(7598323): n is a, c, g, or t
  misc_feature (7639388)..(7639504): n is a, c, g, or t
  misc_feature (7648598)..(7648805): n is a, c, g, or t
  misc_feature (8007544)..(8007730): n is a, c, g, or t
  misc_feature (8053265)..(8053730): n is a, c, g, or t
  misc_feature (8129413)..(8129828): n is a, c, g, or t
  misc_feature (8134123)..(8134311): n is a, c, g, or t
  misc_feature (8188405)..(8188554): n is a, c, g, or t
  misc_feature (8240083)..(8240554): n is a, c, g, or t
  misc_feature (8245992)..(8246103): n is a, c, g, or t
  misc_feature (8305274)..(8305864): n is a, c, g, or t
  misc_feature (8314230)..(8318347): n is a, c, g, or t
  misc_feature (8345692)..(8345793): n is a, c, g, or t
  misc_feature (8408069)..(8408275): n is a, c, g, or t
  misc_feature (8424960)..(8425085): n is a, c, g, or t
  misc_feature (8481845)..(8482068): n is a, c, g, or t
  misc_feature (8597364)..(8597610): n is a, c, g, or t
ctcccgttcctcagattcggggttcatgtatgtgaaatgtccaagagactcggtagtcgagcatgacaacaaagcaatgcatgcaacaaaagagataaatgcaatatatgattgagggagaggtgatgagaaactccatggcctagaaactgaacaatccgcttcgcttcttgcctagcggataaaccaccaaagcggctaggaagagaccaactgtcgttccaatagcaacttgaaccatgccatatccgatatcgaaaacaaccccgtagctttggcttctcgcctcgtcggctgatagcttctttgccgcgtcgacaaatccttgtgtcccattgttcacaaccgcatatggagaccgggtcatttcctcagcagaagtaataccagatatcagagacccactagcggcaagaccggagggaacgaggacaaagattgccggcagcattgccgcagcggcgagcccatgctgtaagcggctgtagaaattgcccatcacaccaatgacaaaggcgcccagggcattggatacctgggtgttggaatagaagcgcttggcgctgaagtagttggtcacgtagccagccagggagatcactatcataatcggcatttgcttccacttggcgcggttgacgatcgccaggcacacagtgaataggatgacgaacggaaaccgttgcaggtactcgttgtggatggggctggcgggacatgtatacgccgttgaagcttgagagtcgaggagcccgtaaacggcagtgccgatggtaattccaaatccgaggaacagcgagtatatgatagcatagaccatgcgaacagaacctgcaacgatactgcgtgactggagctccagactagcacataatacagtgtatcctggcaggatgagggcgatggccgactgtgcgagggcagaaaagcagaacagaggttccccattgaacctgatgcttccaaaggcacgggcaaggaaagacgtcaggactgcggcggagatctcaaacacgttcgaatataggctcgatttggttgacaggatcaattgtaacacgccgaggagacatcccagtagaaacgccacggggatatccaccggtcgggcgttgaaggcaaagggcccgactgatgcgctagcacagccgtgggcgaagatgaggaacataatgtggaatttgctctgcttcttcatgacctcatcgagccgctgtattgcctcttcaaccccaataacatcgtgaatcacttccttataaatctcatgcacatcagccagcttacccaggtcaatgccttgactggatcggacgactttgacctctgttgtgtgtgtggaggcgtcgtcaaaggagatgatcatgcagccgggtatgtacaaaaactggccatctatttggatgacgcgagctgtcatgcgcatatattcctccaatcgatgagttggagctccatacttcatcaaagcgcgacaaagctggatcaagtaccgttgtcgagacagaagctcggcaatatgaacagtgatatgaatttcatcctcaagctgagccttgggacgtgagcggcttaggtttggaacggccgcaccactgctgcgggaccgcgtgagcatggcaaagggggagccagagcggcgggaggagccggccatggaaatgctagaacgagcggttgatttatcgtaccacttcctttgcggtttccaaacggagtctggagacaggccacgtccactgaactcggaagagctcccctgtcgagaccgcccataccgtcctcgaccttggttgtggttataacgaggcttctcgtagagcttgagcagcgatgagagaattcctccgtgataacttgtcgtccgttcagcagactcgtatgagttcctgtcctcgctgacggtgtcttggtcactggagtgcaacccgggagactgagggcgaaggcgagtcagaaagttcaggtctcgaggtgacatttgatgcactagataatgtgctccggagttgcacggtgttgatcgcccgtctaagaattccgcttcatgttcatctattaggttgtcgaagagttgttgtttctcggggaagcttatcacaggaaatttatcttcatctgcagtctggcacaccacttcggtgggggtggatccaatctcagacactagactgcactgggggctttgcttcggacaattatgcgggcaattgagaagggatgtgagcctgtgggccctttcatgtgcaaagcagatggcccgccccttgtcgttcgtaccctgaccaagctcatactctgctgaagttcctggtgagctagtcctggtgctgatcgtcaaaccggtaacacccgctgacgcgctaaaatgatcgtcttccacctgtggtgccagtggggagcttgaggatactttctcctgaaagcccggaatgttggcagtgggtaatggtctttgcggcagctcggtgcccctttgatccagtcggaattcgaccataggcccagtgggttgttctctcaaatcggattcgctgtccgtaagcttgacgcgatttgtgtttttcagaatgccggcattccgatacttgtcctgtgcgctagcgtcactgaagctccgcacctgagacactggctggccttggaagctatcaatgagcagtgatgatgtaaaggaacgcgaccttgatagactggacgatccttcctcagaggcgctgcgggagatcggaaggtcaaaataacctcccgccattatggtgtaatccttcctcttagattggcatctacttcttggttactcagtagagctcacagaccccctgggttaccgacctcttagataaaagcacgggtatggcggttcatgtgcccaggtgatcaactgtaacccagcaacagtcagctatgtgatataacatggggagagctcttctttccgggaatttgtgagcttcgacaaccacggagagtgagctcacctcattcaaggcaaaagcataaaaaaaaagaggaagagatactgatgccaacgcgaaaaagaactggcacgaactaccacgccgggtctagagctccttgggaaggggggttgagatcggagatcctaccaggaattccaactatgtcatgtgtacataattagacgtagaatattgtgtcggaaaataaggacatctgcaacctcggaggaaggggcaggaggaaagaaatcaggcaaggcaaaatcaatataaaagagacagtagacgcgaagtttgggatgcaggagttcctctatttacgaggatgctctcggttaaaggcaagactaaaacaaaaagagaaaaaagacttttccagcttgctgggcagcacacgggccatatcaagaagatccagaggcccaatgagactgcattgaaggggatttattttgggacatgatgaccccgtgtagccgtgaggcgccatccccatgccaggttctcacaggttttgccattttgccacgatggtcaatcagctggaaagttccaggagtagagaacaagccgaggtatggaactgacagctagaattgtgaatagaaacggtacattgccccttagcgggtattgcgggagattggcacattagttgcgcgagacccggttctctgacctgaaaaggattggatttgcagcacagccgacgttccggatcgtatatcgttgaacctcgccgaacctcgaccgttagacctagcagaagatctcccaaaggggatagagataaggggaccgagctccttgtcaaagagactaggggtttcacaagtccatgaggtcccacaaaatctgtagagtcaaaagagaatctgatggacgcgtcaggtcaaaggggtgtgtgtgtgggtatcgagagattggctgaagagggatcttcaggatcagaggttgaagaagatcagtggagcaactctcttttttttagcgttgatctaccttttcatgttgactaagaagcaatatctggtcttatctccccttctatttctacttgcgtccacattgacgtatgaaatgcgattacgaaccagtccaaaccatcccttgtgtgtctttgacatcatgggaaatcatccgacaggcgaaacatctctgtcatgcaagatacctgcaagatacctgctttcactagtttctgattgattcgaccagtcgagaactacatacgtaggattccaacactattttattatccacctacatactataattccacatcaatatgggtctgaagatccctatcacaccatcgggaagaatctcatcggtattgatggccatctctctactttccgaccgagatcttaccgagaagcaaatgagtactcataccgcaggttgacacccggaagacctccgggacccgactcggtgttgattctcagaggggatgttgaaggtttttgatctgtcccggcaatgtacagggtaccacgatgaaaggttgcactaatatccggggaaactgtttactctctctgcttgttccagtgctgtaaccaattctactgcccataggaaagcccgacaagcacacatgcactcctcagcgggctcgaaacgcccccttcatgttcaaccaatatcccacagatgagctcctcgctcgtcattgtgccacttcaagatgtgagatgcttatctaggcaatgatcattacccaacctatgctgcctaaaaccctacttcaagggagctggggtgatttaagcttacaggtgtggctgctgactagttctggatattgtactagtcatggttatcagtcagggggggacagccagggcccaaattatttctcgagtggcaacgaacggtacattcaattgggtactgtgcaaggtgactcttgaatctctgagatggtatcagatagggccaggattgtctctttcgaggcgctcgttatcaaacgttagtattgaacattctgatggagttttcgtgcgctattacattgggccattcgtggcttggggaggggctttctcccatttgtttctcttcttggactagatcaatatcttacgctatcacaactgtagaggcttgattgaatatgtcttgcttcacctctatctcattattttatgcaacaatgcgaccgcacaaccatccgtgtcaccctcaccctccctgtccgtcacactgtcttcttccccaccagctgtaccgaagaatataatggtgtgaccttcaagaaagtagggaccaatactcaagcttggacggcagtactatactgtttatgtgaaacacatgtgccacggagttccggctgctctaccctcgggtagacacagataaagctgctttaatcccaggattcttacgtggcctgggagtaagtaaatatatcgtcttctacaattatgcattgtggcattacactttagagaacgaagatcccgttcacattcctaaagttaagctctcgactactatatataggttttgtcaatggtaaatgtcttgcattgcgtatgtttcaacttcctttctttcatgatggttccaggattgttgccattgtttagttgacttgtagacacgtagaaataatgtcaacttagagtttgtgtcaaggttttttgggccgtattcgtaccatggttcttgatataacgaccgcataactatttaggtgaatgcatagtgattcgtatgttccaatctcaactcttagaatatcaaggtttggacgccggcatgacaaccagccaagtatatcaaactaggtgccatctgcacccacgcggaatacggtttattgggcttcactctgcagcccaacggattatttccctattcaccgtgcagacggaaattaagctacgtatatgatgagaagccaagagccactaaacacttaataacatttatcacatcgtttactgtcactgaagtcctcatttgggccaactcatcactttcctcactgacagcggccgttcgagatctgagttcatctcagtggatgtataacaatcagttctcatttcgccttttgacaaaagcgtaagctggaaccgaaatagttatgcagctaccccaagctcgggaccaccctccataagcatcagcatacaacccggctctgtaaccatgacactcagcgtgaggtacattacatggtgcatcaagacgacagacctttcaatgtggtctagtgagattgatactgccccaagccatggtgacctctagtagccattctttagagtatcttgtaaccctttgaccctaccctggcttatgcctttcttactttcaaacatcaagcttaatgatagaaaacgtctttcctacagcaatacctacccaggactcttcaacagaccgagtaaccaagtgctccacgtgggtcattgcaggacaacaccaggattatcataggatctaagaaaaatatttgcgtattccgaataagccgttgaattgttcaaccaaaaaaactacttagatactagatacgttcatggagcatgatcaacatagccaaaacaaaaaataagatcagatatttgctaagatatgtattcaccagggtgatctgagctcaaagtgcactgggaagagctgtctgtacataaccagatgtacatcagaagccaaattgagaagtgaagggaagacaacttgccatcgcaagttcctcttcctgtctcaagctcatcctgtcatttccaagtaaatagatccggtccgcccagcctcagttatgatgcaaggtgacaaagataaagcatagtggagaaatatgaagagaagccaaaagaaaaaaaataggaataaagtcatctcagaccgataaaggtctttcgtcacaaaaaaacatgaaccctggcatgagttgccagcaatagagtggtaacgagaaaaagaatgggggagggtcagccgctgtcgagtccttttaatcaggactcgctgggcaaagaaagacgaaagctgacccgtttggcgagagaaaaacataaaggaaggtcatacgtcgctgtcacgtgtggttcggcattacatgatgggtgtcttgcgtttttcagcgctggacaacaccagcatcggcgtcttgcgccgttctggtgcctgggctaccggcccctggccagcaacgacatctgccactgagggcgacgaggtaccactggcactaggtgagtgggcataatccccgcgagcatcaacaagctttgagtaaaagtagcctccgtcttcgctagtcggcgtggcgctgtggaaggggctgtccggggatttgcgatcccgaccagatttttcccttctctcggatccaatggcaccattagcaactgctcgcaggctgcctagactgggcttgctggagagacttcctccgctacgcacggtggcatcatcgccatccgaaaaagtaaactctttctcactcgcaggggtgttcgtgcctccgctgctgtggtatccaaaactgcgtgtgtcgccacgacgctcgattcctgcgcgaacaagattgtgaacggcacgacgccgctggcgagtcgcgaagttcttgctaccttcgtgcttggaggtgggcttggccacgagatcctcaagcgaaggggggccacggggctgacgcatcggatgctcaccagcacgactttgaccgggtccaaatgttccagtggccggtgtcggcggcagggcagcagacctagggccgggtcccacattggccttgacagtatcaatgttcgtcttgatacttgggttgaacgaaaggttcttgcggtggcctcggcgcagagcattcacagacgagtcgtggggcggagaggggctgctaactggaggggaaattggctgcgggaattgcatggtagagtacgtggagtccgcaggaggagaaatttctgcgcggaactggggaacttgctggccaatatgggaccgagtatcttgataaaactgttgctggcgatcttcctgggagttatccatgatatagctttgttggccagtcagaggattgtagacgcagaacattccaggttgaccagggaccggctgcacaatgggctgaacaccttgctggagctgctgttgataaaatcccatgccagggatggagagtgaaggagcatgttgctgccgaggaagggacatcccaaggttgaggccttggaattgctgagctgcagcagtgacactgatcaactgctgttgcaggcgttgctgctgcgccgcaaggaacaggttggttgacatcaactctgcgtacatgttctcatcgattggaatatcaccacccgccatttcaagcgtcggaggtgcaagaacctgctccggcatagtgtacatcatgcggttgtgatgcgagttgttgcggtacgagttcgcgttttgattttgggtgtaattgtgctgtgggaatccagttccggtcgcagtttgtgggacccggtcggatcctcggttggaataaccagtgaatcgtgcaccttccattccactccgctgttgatgctcagaggggatcgtcgcagacttgggagcagtgcgcagtccagccaaaagatgagagcggctggtacgcggagtggagacggatgctgatgcctgggactcatcgatggtcgaaacctggggaggcatgctcaagcgcttgatgtgagagcccttgccgcgcgaggcgaagccagagcccggcacgcccagggaattgccattattgaaggacgaattgtaagacatttgagcaagaccgccagcgtccatactcatattcgttcggtagaggtgaatttaggtatgtgcaatagaatgcaagcgagacaagcggtatcttttgacgttcggattcgacgtgagcgtttggggtcaaccacaaagctgagctcacttctcggcgattaaggaattatggtgtctatgcgagaacaagtgctgaaataagtctgcaatatcgagattcaacgaccggaaaatgaaacgtggacgcgagagtcgggttttctgtatccggaaactggtcagtgagatccaacggatggggcacaaggcaatcacacgtaccaatcacaggtgaagaaaataaagcgagcgagtggctagcgataaagacgatagatgagagaagaaccgagctgtacaaggacttgctgggtttgaaagttgcgaacccaaggaataggtctcgaggaagccgaggagtttgagatatgttgacagacacctcgaaagaaaaaagaagaaaaaattaagagggtatttttaggaagagaagccacgcacgaagctagaccacgaagaaaagataaaatgtccgggggaaatgctctgcaaatcctagccgaataagaaaagagagtagttcacgcgatgccgaagatcgaagacttgtaggctgaaacactcaaggtggcgaccaaacaacccagtgctgtgcgaataaccgaggtgaaaacaggttcaaggatccgaagagatggatttgtgaagacaatcaaaaatgtagtgaattcggtccttggccaaacacaacgtttttcctcaggggggcggaactgatcgggactatttgcaaagtggatagatgctttttttgggtgttttccatgaaatgagaagagctgcagagaaagaaggaatgcagaggggaagggaaaggaaaagaaagaatcgaagattagatggagggttggatgtaagagaagaagaagaagtgagcgattaaagatggtggatggccgcggggattgtcgcctaatccctcaggcagcaaccgagcacaatagtccaaaagcgtactagcgtcttttctcaggcacgagaggcaatatcaacggaatatcaacggaggttcactttgatatcttcttttcatcatgtttggaaacattggggtaattcaagctttttcagctttacccttactctaggcaatatcctattctctaccgaatgcctgatcatagctgacagcattatcatagaagacccattgaggagatctgactggctcattctattgaccaataagcaacacacccaggcctgaagcgatcccatcacatccccagccaaatcattggctgttatccactagcggcgcgacgtggctgccatccaatctacgcctgacgatgcccctggagccgctcgtcgcaaatgccaagctgtcggcgccaaccaatgggtttacctgaacttgtttgcttctagctcataattcagtcggatctcgttatggtcaggaaatcaggagtgtagtattttgccacgaactgcaagtgatcttaggcggctttgatttctagaaggcaacaaaaaccaggaaaaaccaagaaaggtatcgggcttgcagaacattgtctgctatttcgatacagggtagaatctaagtagactacaattctcatcacattcatggttggatgctttctcatgatacattgcacataatcaccaaatgatgcgatgtatattattgtagaaaagatcacattctcctgaatcatgaaaccagcaggacttgtcgcttgttgctaccccaacgacaagccgacgtcttcttcagcaggaagttccggaaattaaaaattggcttcatggctgcccagacgggcgtgcaagtccagcaacaaataatatggacgtgcaccatttattttggggccatatatagaacaaggtaataagagactgcatagactagggaactgttaagtgagatcgtgacataggagttagcgtgattatcatctacaacggccatgaagatacggattgtcaattggataattcatgtaaacgcaggtgtaaaccacgcattttgtcgccctaaatgaaccatacatggataagatacgtctcagcccctcctggcttcgtatttcgcatctcgcccgttccggagccgctgtctcccacgttgtatgtacaatgtacaagcactttgatggtctgtacagacacacgaaaagagttagactgcctgtgcgtgcattgtcagaatgccagtcaaatggcgaatggacccagaaccacaactagatgagttgttaatgagccatgagaacatgaagaaaagataaaccaatggatacgaagaagaaagagaagatgcggggtatctgctggctgggtagtgtgccagagggagaaaatcaatgagtcatgaaatataatcaaacataaaagttcacgcgtgcaacctcgcggtagttaagcatccaccgagacaccgggtccatggtgagtggccgactcattctgggatggtaatcgtcgatgacctagctccggagtagtgcccttgccgttcattcggtcaaattccaacgtctcggccaactccgcagccatagggtctagatcttcttctttaagtccggtcgccaaagccaccagcttacggtgcatatcgaacttggtgctcacacccgcatccgctgtttgttgggctagatccttaatagcattgcggcgtatcttctgcgcagagcaaagctcttgagcgagtcgataccgagccattaattcaccttgctcaagggactctgacgtaggtttaggtacctccgcaatagcaaactgttcagccaaccgagcatgctggatttgctcaagaagggactcatagcttgcccgcaatttttcatatcggccagcttggtcgtcattgcgctcatgatcggcctccttggctgccaatgcagatatttgcttctgaatcttctggcggtcggattccaattgctcgtgtaacgcttcgggattggcgacatcattggaatcctgctggttgattttcgagtttccataggtcacggcaagctttttattagcctcggccatgattgttccaatcctggagaggagttcagtggtcgcagaggcatccggaattggggcaacggactgtcggtctgtgcccacaagaccagctggttcaacatccatatgttcattagccatggtgacggaggatggggccggcgggatgtcatggtcgtgatgttgagaacgctgtacgatactgctagcggtttcccccttattattcaccagatcgccagcgcgatgacaatgcacaagaaggatattcaccagacggaacgcgccgttgcgagcagcgaccaagacagcggtgtctccattctgatcttgacatgacaacaacatttgtacttcatcttgcgagcatgttttgcataacttatcgaggagtatttcgcagtaataacgtgagctcttccatttccccttgcttcgagtattctctgcaatgtgatggaagatagtggcaccgaaccaatctcggaaagagacagtatccagaagcatgtctaagagattcgaaaacgttctcttttcgtaattattggtaaacagaacagctcggacgagtggggtctcttcatgatccgaaagtgccttgacattggcccctctgtgcaaaagatcttgcacaatgcccaagtcacccatcgcacatgcccagtggagtgctgtgttcccagaatcatcaatagctcgatcgacctggaaatgggcagggggttcgggagggggaatgcgtgttgcctctggtgcatcacccacggtcatgaaatagtctaaaagttggtcgccgtagattatgtgttcttgctcgctgatggacataggggtcgcctcctccactccacgcttccgcttccgtccgccatgtgacatttgaagcatatcctcgtctgcgaccattgatgatgattcaattgtagcgtgcccgattgactcgttgtcgtcaaacgctgcattcatttcatagtgatcctgtggaattgttgggggacccatgctgcgctgaggctgaacaactttcaggctttcggaagctgctaccgcagccgcggccgcggccgcagcggcagcacggtttgcggcggccgatttccttggtgccctaggtttggatggagccgatgtgtgctttggcgctggtgggggactgtggtctccagcaacataatcgaaaatcggagctagttttgtgaggatgttgttgcgttccgcaagctggcggccttccggaagtgggatccatgttcctgtgagcattagctgtcagcaagctaaattttctacgggcttcatagatcctaggacataccttgatatttgccatagcctccctgaactttctcatgtacccccttctggacctctcgttcaagaatgcgcgttcgtgcaggcttatcaaaccctgcggctttgaggatgtgtgttgcattgacccaatcatcccctctccttctcatcacactttcagtgtcgagcttgaactcatacacggggacctgggagagagaacgtcagctgtgcgcgcattcaacacggacaacaattccaggccagcgcagtgaaaatatctaatcaaggtatacttacactgctataggtagcagagtagatggtgtctctccccgccataatgtgcgtcgcgcgttggccgctacaattcagtaggttcccgaagagcgatgtaaccgcgcgcgttggagccaaagcgtgacccctagaagacccacaagttgatcggcttaagaattcttcagaactagatgcattgcatgcaatgaaaatccggaccaagaacacagagatacgattcggtggagctggggacatcagatacgcgctggacgcgtaaagtgcgcactagtcctgtttcggaagactatctgtcatgtgattttgtgtcatgtgaccaatatcggcccagcaggaacctcagacgaacgggaatcgccaaccacgccgttttgcctctgtttccccgctccttgcctctccaccccttaattctcgacaaaatgactgtcattgaaacggttaagagcgccgttggcctttcggagacatccggtatgattcttaggccattgattaacaatcataagctctagcaggaaggttaaccaaattccagcaacccgccaggaaatgtcggaagcccgtcttcccatgcagtacagagattcatgcgcacacctgctgatcccgttgaaccgatgccggcaagcagagtactaccttccctggaagtgcgaggtacgagatccctcgttttgatgttcctacacaacgccattcgaccggagcgcttccagagctagtcagctaatgttttcttttcttttgtatcaggatgaacgacactcatatgagaaatgccagtacgaagagttcaagaagcgcgtggccaagatggacgagctgcgtgccgccaaggactacacccggcgcaactgaattgtgggactgttggtatgcgcagtcggtgctgctgttaaagcagcaggatatgtaaataatagatacaccgaaactgcttatggattgccttttggcgttgggacctttcatcaaaatcggccactttttcttcgcccatctgaacaacaatcgcatcggcaacttgatgctctgtttagtattggctaggctggtacccatgcttctcgggctggcctttttcttgggccaagcaatgtctatggacaactcgtcctttggcatagctcgagcgcatgtaagcagatggcatggtgggttataactctagtggactctaggggctttgaataatcaattcattggagttcctctgtgatcaagacgctaggatttatagttcttttggtgaacttaggccgcactgctttgctctaggcaattatgccttccaatgctgttacgacctaccgatgtgaagcctgtaagctcatttgagatatttacctatgtattttatagatctcgccctatattaaacatcttgagctatcttgagctatgatcatcgcatgttgtctaattaaccccatttagtcctgcgtccaatgaccgtttgcggctttataagcttaagccgcaagttctattggctgtattgcggccgattggttgcacgatattatactaattgtaggaggtatggatggtgataattgaaacagctggacaaattgaataagaccgaaaaatacagtctttcctatatagctcttgatgaagagctacccagatgatttctctcatatggatgtctcatataacatcgcattataacgcgatacctgcttatttgacacttgctttcatgcagattcacgcagtagtcattgaatcatatcaatcaatcccttatacttgtgccatgttctatgtgatatttggcatagacttctacctatcctataggtaatagcatccccacagtttagctgaatgtgggtatcgaacatcattcaagtttatcttggtattaactactgactatcatatctggatccattttcattccctttgtatatatacaacgctcaggcctataatagacgcctttatggtgatcctcgaagacgcaagtgcagggtcttatctcaccacttctatctcaccacctcaaagctctctataccaggacactccatgttcaatatctcccaaattgaatcaggtgaggaccttgataggattaccttggaagtctctagagcttcaccgtgacaaatcatgattaataatacaagtcgaagatttggcaggtggaaataaaactcccgccgttatcgccgcccccgctagaaaatcggccgaaaacttgaccccctcattgcgacttgccaggaattacagcgaatcaattagaaaggggactatgcgcaggtccatgtctctttgattactctcggtccttcaatcttcggctttcctgttcactctaggattgtcttgattcgtttatcctatacttgtgtctgggcattttgtgttgtcagcttgagagcaacgtctcgacacaatgggacttctgtatgtgtcttgagatgcttgatttgctatttgggatccctctaatataaagcagggcacttggaacagcgctggaatggccggaagccaagaaaaaggcgggccaagtacgccagtggggtatcgaggtatgccgcgtctaggtcgcaatgaaacaatttcaaggtgtctgacttgattagcaattacttgccaattggcgcagggcacgaggcaaagaacgcgatgctcttctttggggcgacgaggtatgttgttctggcccgcgtatttcccggtcgcaatcgctaatcaatgccctctatgatagattgaatacctcgtggtagctctggacgacgcggcgaagaaggcacggctatctctagcccaggctgagatcctgatatcacttgcaagagacgaggagttgtggaagtctggctccggcaagcgcagtgcaactggagaccagtgagtgtgattgatgtccaacaggaactagcatgtctgacatcaaccagtgaaggagaggagccgcctcatttccaccccgaatttggaaggttcatgttggaggctactcctggacagccttggggaatcgggttcaaagacctcctcaaggtggagtccaatatgaagtggaggtgagctctttagcaatacaacttgactcgaaacatgctaatagaccccaagacgagaagttgcgaaagcacacatggctccgaatgaagtccccatcaccctcacaactttccctcggctaggaaccagtgatgactacatccagccatattatcccccatctgggccagctcttcgctcgcagtttgttcctgatgagattgccaatccgcatattcgattccctactctggctgccaacattcgatcccgaagaggtcgcaaggttgaactgaatgtacctgttttccatgacacaaatacgcccaggccattcaaggatccaacagttaactacgaccttcataattggcccgaggatgatgacgtccgcaacggcgcagccaaagatgaccatgtctacatggacgccatggcatttggaatgggcagctgttgcttgcagatcaccttccaggcaaagaatatgacagagggcagaagtctttatgatcaactgagtcctttggggcctattcttctagccctgaccgccgctacacccatctataagggtttcctagtggacacagatgtacgatggaaccaaattggcaatgcagtcgatgataggacgcccgaagaacttggcgaagctgtaagttttccagaatgatacccttagcccagaactgacctctcgcagcctctcaagaacgaccgatggagaattcccaagtcgcgatatgcctctaattcgacttacatatcccaggatcctcgtcttcggaaagaatatttcgatcctgatctagttgttgatgaggatattaagaagcgccttatggacgggggaatggatgagctactcgcgacgcattttgcacacttgtttattcgtgatcccttggtcattttctctgaggatcttgaagaactagatcttaacaagagtgaccactttgagaatttacagtctactaattggcagcacatgcgtttcaagccgccgccacctgataaggatgatatcggctggagagtcgagttccggtccatggagatccaaatcacagatttcgaaaacgccgcatttagcattttcatcgtgctcatcactcgtgccatcctgagcttcgatctcaacttctacatcccgatccagcgtactacagagaatatggagacggcgcacgctcgcaatgctgttcttgatcggaagttctggttccgcaaggatcccttccctcgcagggtgcccagaagcgcacagcactcggcgaacggcagcaccttctcatctacgacatcgtcggctattaacactccgcctccatcgcctcctcttggccctgttgagacagaatttgatctcatgaccatcgatgacatcgtaaatggatgcacagatggatcattcccgggcctcatcccgcttgtggagtcctacctcaacagcgtgaatgttgacgtcgagacaagatgtttcctggccagctatctggatttgatccggaagcgggcgaatggcactctttggactggggctcgttggatgcgtgagtttgtagctaagcatcctagctacaagcatgacagtgttgtgtccgaggagatcacctacgatctagtgaaagcggttgaggagatgactgccaaagagggaaaaaacggatcagtcggatgggaacttcttcgaggcaaaaaggtctagactagagcatctacatacccccacaaatagatatccagagtgtgagcatgtatggcggaaacttgaacaatttgcatatattcatgacaatcggggacagcctccttgtcacagcgtctgatgaatcttaatttctcatttctcagtgtctccaatagtactcattccagcagcatttcctcctcagtcggcaaccgacacgagtccgccagcccagtcaccttccattcgccgttgagcttatgcaaaacaaaaagctccaccccaacatgatccaccacgccgttgatcttcgcccggaatggcgcccacacagcggccaggttcaggctgcctgtctcgtgcactttcacctcaggatcccagatacgttcatcgatatcgtctttgagcccagcgacatgttcaacgaacgaaccaatcgtacaaaaacgcagggaagtcggagacggaggcgagagtgtcatccctcctgctcggacacagtgtttctcgaaatcagtgcgcgacttgctgctcagtgctgcgaggaagccttgcgtgactgcgataatggcggctgtttcttcggattgtagttggattgctgccccggtgcgagagcggttcggtaatgaccagcacattgatggcatgatttagatgggagaaagcatcaacattgttatattttcgatcttcggtttccaggagcaaacatgtcgatatacgtgtacctacatatgcataccactattatttaggccacagctgttaccgttacagtgcctgtcggcctgttgtttcggtatgttacactttgtccaactttgttcaatttcagggatttcaggaaccctgcgatcttgctgtcgtacgaggataagtgcttcgtgtcacacatcgactttggtgcttggtccgggtttcgttttacaatgttgacgtccgcttttggttgaatttggtgttcgtgttactatcagaggtctgtggtaactctagctatgggtcaatttatctccttttcctatgcaaatccccgggccgagtgcaaatgtatccttgagatctttattcacttacctcggccagcgcaaaagcttcggttaatcttcggactgatcaacatggcctacgactaaagcaggcaatcgtccgtcaaacttttgagaaaatggccatgaagccaaatacgccagaacatcctgaaggtgtattggtggatgaatagccatcccacctctccgcttcctgccataatgcagatcctactccaacggctcatcattccaacctgctacgtatcttgtccgctacgatcagagcaaatatcagccgtccacatctcccggctgttgatcatagacgattcaggtgattgtggggcttccccgcatcaccaacgtcctgagaccttccagtaacgatcctatgtataccccggagtatataaatgaaacatgaaatgccacacattgggagggctagagcgggcaagggcgtgtccatttataccatcatgattggatttgcagccggctttctactatggacagtagtccatgctgtccctaaaaaatcatctcccacagcggcagtgcgcaatggaacgtatgctggagtgcggagctcaacctacaatcaggacttcttcctgggtataccgtatgcccagcagccggtggggaatttgcgctttacggtgccgcagtcgttaaatgctagctgggatggtacacgcgatgcgacacagtattcggatatttgtgttggatatggcgtgagtatgattctttcggttgctttccaaagttgattcttaccaataagaaatagacggactcgatttggtactctcagtcagaagcatgtcttactctgaacgtaatccggagttcatctgtcaacacagagtcgaaactccctgttggggtgtggattcatggcggtggattttatgaaggctctggtgctgatgagcgttataatatgtctgcaattgtggagaagtcgtatcaaattggtatctccctctctcttggatacttgaagcctggtctaacgacgattcaggcaaaccgttcatcgccgtcacgctgaactatagactgtccgcatggggctttataagctccagtcaagtttccggcagcggaaacaccaatctcggattgcgagatcagaggctggcgcttcaatggatccaggaaaacatcggcgcctttggcggcgaccccacgaaagtcaccatatggggcgagtcggcaggtgccatgtcagtgggataccatcttacagcatacaacggacgagatgacaagctgttccgggctggtatcatgcagtctggggggtcgatatccgcgaatccgggaaattacacgacgttccaatcgaactacaacacattggcctccaacgtgggctgcctagacgtcgtggattcactgcagtgtcttcgtgaagtaccattcgagacactcaacgctgttctcaacggcacggggggcaactctgactacaatttctggcccgttgtggacggggacttgattcagacatggggtagcattcaactaaacaagcatgcattcgtgaaagtccctatcattgccggcaccaatacggacgaaggaacagcattcggacctacggggatcaacaccacagagcaatggtatcaatacttgacaggtacctaaccaaatcttctacactgccacagcggctaaccctccagacgggggattggacttccaaacacccccctccgtagccaagcgcatcctcgacctctaccccgacgacccctcgcaaggcattcccgcatacctaggcgaccagcgcgtgccctccaaagggtacgaatggcgacgcacctcggccttcgccggcgactggttcatgcacgccaaccgtcgacgacaatgcgaagcatgggcggagacatcaacgcccgcatactgctaccgctttaacgtgcactcggcagacacgccactcctttccggcgtgacccatttcgaggaggtagcgtttgtgttccacaacattgccggactggggtatcactacggcaaaccgtttgccggggtgccgcagtcgtacatcgacctcagctctgcgatggcgggcatgtgggcgtctttcatccacgacctcgatccaaacccgaaccagggcgttgtgaaacccgctgtgtactgggattcttattctagggacggacctgttgatctctgtctcgatgctaatacgaccagtcatatggaggcggatacatggcgccaagacgggatcgattatatcaactcggttgcgcgggctttctggcggtaaagggggttacactgtgattatagaagaaatggcagatggcctagattgggcttacaaatgaatcccaaggtcgaatcggatccgagggtcagggccaaattattaaagtcgttgaaccatggttctttctcttcatatccactcagcacgcgggtattgcatcactgctcagttgccgagtggatcggttccaaattatgccaaacacaaacaaatatgtactagtactagtatgtatagatggagtactccctgttcaatatccaaaataaaaacagacaatctacaacgtacaggtcatagccgaaaaaagagtgcgtcaactgtctcagctctagtttgtctgaggccgcgtgtaatctatagacgccccgtcagacgcactagagttgtagatcgacatcgcgatccaattccacgtctcactagacacgatttgcagtcagctcgtatcccgaaccatggttgcactcccgaatcgtccggaagatccaataatgcatttttgctttttcagacccacgatacatgtccatcctgaaaatcagcccgagtcataagttgtagatgagacttgatatagtgggtcgctaagcatccctttacagctacctatattggatgcgcactatagacgcctatcgcgcggatcccaaggcaaatccaggttggacgaactaatgtcttcaccacggctacttaactaaccaactacctaaccaactacgtgagctggttaccagttacggacaggagaatagacatctcagacatctgacccgtgacgtggccgagcttagaattataaatccactccagctatccatggatataggatctcacatgccgatacgatgccagccagcctttgtttaactatgggtaccagttctacggaaattggaatgcatagcatatacctacattcccaagctcaccgccacaattccagcgccggcctgggagccagagccaatctcagatcgcagcgggagatgctgcattgagtaaggatctcagcaagatcggggcggggctgaaattctacgatttgaaactttcatgcagggctagcttttttaggatggttgcctccttttccaaggagtgtatgcatcttcctgcaagccatctggaagatctcgctcgatccggggtttcggggcagatagagatacagatacagatcgatctcgggagtatgcacttcttattgaacttgtatacctaacaccttacattgcagtatgttgtatcctgatatagatatatccccctgtctacaaagtattgtatgtatgtatcatctcccgtattacacatacgcaaacacagatcagcaaccaaagcccctaagccaagactggaaccaatagtcggatccaaccggccgggaattcgatgcgtctccacccatcgccccacgatcgcctactattggtctcagccagatagacttttcactaaaaagggtatttccgggcactcggtttcaataggtcagcccacctttcagcaccgatgtcaagatggagtcagccgcgagatccagttcgcacccgggaacgaccggttggggagtcaaaaggtaaacgaaaacgaaggaatttggcccggggttgggccccagcgaatcaggtggtcggttgatctgcgggtatttaggttttggtttggtgaagaagatcatgatattattcttcactgatatagaacacacctaactacaacaaacatagtgcaatatacgtagtacgtaggacgttgaacttgcgtgtcggatagatccgctgcagttagtactgtaatgtgtgcatcttttattctttagaccaacaatagttgatacaatggaataataaattatacttgtacacgaatgtacagatcctaatgcaagtccgttaactattccatctccacggcgaagtccgatacttctctatactgtaccaccgcaataacccacgatataccacaagcagcaaaagcaagaccgaagaagaaagaagacccaaagaagaagaaccttacgctccacccgactacgcccaaccgggcctggcgccagaggcccgagagcattcaaataccgatctacggcgtaccaccgcgcgcttcagctgacaaaaactgaggtcgcgtgggccctccaggaatacaccgacatttctttcaaacagagttctgacagcagggaggaaccgtcgtctccacagcggacgttgttcgcagttcgcagtgaagtattctgtaaaggagtttcctatatgcgatctacaatacggagtattcgtcgacgatctcagtaactagagtttctcggccagatccaaggcttacggcttataggctgctagggacgatcagcagcgtcatacatattttcgatactgtacatactgtgtggtatagcacgtccacaaattattattagctcgtggagatattccttctccggatgtactccgcgtgtactccgtagtccgtactgctatacgtatacggaccgactttccactttccgcttttcgctcttcgcactgccgagtgcactcccgtgctgtgttgtccaagcgcggtggatggtggatggatacacgaaagttcgctagtccttttttctttcttatgatcctccggtacgagatggagattttcacggagaaccgtagggtctgctgcgccacaggaaagttgtggtgccactaactacccctttaccatagttgcccagtccgtagactgaatatagttacataactagtagtgagataatccatcgtggggataagcggctctcggtggatctcggccgtgtttcgggagaatccagacaaagaaatttactaggaaaaatctgttttcaatcccgcaaggagtatcgtatcatgccatgttgttccagtaggtacggagtatgtaacctaagagctgacggtgtccacctagttaggggggacgaatcggatgaatcagcgtgtcccaaaacggaatctgctttcgagggatccttcctggattggctgtgcgccgtggaaatataaacccgtagacagaggtatgtatacattgtcagcaaaattagacagccgacgtttgtatagggtacggctgatcgcatagatccccaccgggatagatgaacgtgggatcttgatctgggatcgatctcgatcgatgccaaccctgctagctgaatatgattatggttatgatcctcggattattggattctcggggtaaacgatgttccgtccaacgtaagcacaagaaaacaaacagagaacacttgtactaattgtcatcaactgaaagtcaaagccgaagaaaggataaaagaacgttgctacttcctaagtgggcttagcgatatccagcccgcagactatgcaaactctccaggccaccggaatagccaacacctccatccccatgtggactggactcacgaactaagctgtcaaatggatctcaccttcatgacaaatatcgagacgcggcttatgttgtgatccaccggcttattattccttacatgcggaagaatgtggcggtctgtaataaggccacctacaacatgctaagataaatacaagtgatattgtagtaccccgtacatgtctatatcgtaaattgcttatatccaatccaaagaatgtattggccatacccaagccgtaatctaattttaatctaaatttaatttgagatctcatgcccgatcccgatcccaatgtagatcggatctgattatctgaacacaaataccttgcagcgaatgaccgcacgccgaccccccgctagttcaatcggcggaaacttagttctcagtcgggacgatctggtgagttggtggtctttttattggggaatttggatgtggaaaatttagacgatcagctgggatgataactagttcgttgctccatatatggagatctttctggaacccgcgaatttaaatgacaatctaattttgatatcgcatatattagcctaatctgcacgttcaatatctagggtagcgaatcagggaggatcatgccatattgggatgtctacgcttatgagagatggatgcgacccaaagaaaagagatcatgccataaagttaggtgtgaatcagattaatcgagtaaagatctgtagtacaaattcaaagttgagattttgatgatattcaattagtattgccatcccgagccaattccagggatatccatatccaccacagaagaaaaaagtgtcgtaaaccttgaacgtcgaaaatatcgaccagaacataaaatagatgtaacgctgaatgagacacgatcgtacacatatcatatcagggacatactcgaacagaagtggaaagaaccaagaaatgcagggtattgagagatagaggggaacatggaggtaagaacagaacagaacagaacaaaacaaaacagaacatcaaaaaaaaaatcaaaaaagaaaccagtttcagaccaggccgatggctattgaatcatcaaagggggatatctatgctaaagccgtttttctcccagtaccttggaagctgttgggggtattataagaacaccgagtagggaagagccccaaaaagacaaaagaaatataaaaaaagatcacaaagggaagacgttagacctcccaaaagaaaaaaaaaaatggccactgaactccgttgccttctatttcccacctttttcaacgccgaaaaaagaagctgaatgactgagaagctgactgagaagctgagaagctaatgactggttggcgaggaggagtcgagaaccgacttgggcttgagattcgaacccaggctcgccgctttgtgagcgcccatcttgcgagtcaatttggcgtaatgtaggccgcatgcgttacacaacgtccgggcaccatctgggccgcgacgccattctggcgtttcggctcggttgcagctgtggcaacgaccaggaggcgcggctttctgcaaacgggttagaaaagtgtcaagatgtcaatacaggggaaagtctagacttactccgcgccgtttctttgggtctgcgcctgcgaaaccgcccgtgcctttgaagtcttcctggtacatcgccatatggtcgtcttcggtcttgaacgccttgcgctgcgccatctgttcagccagtgcttgctcctggttcaccacggcggtgcgtatccgaatcagggcatcctggttccgccgttgcatgtgaagcatgtcctccacttcgttgagcgaagggagggagcctaacagcgggccggaacgctgcgtttgatgtgcgcgagacgcgtagtgccgtgaaaagtcgagggtgcgcgtactcaagtcggcgagctatttcagtcagtaggtaattcatttaacaagtcattcttgattttgtccatcggttcaaaataagactcaagggcgaatccatacctcattcaaagatgtctccacatcatagacgtccaaatgccgcttagactcgttgtgcggagctagtcgactcacaaatccacccttgacctcttccacccgtggcgcacccatgtaggcccggttatcgtacggagccggcgccggaggatacgagtggccggactgcggttgaaaagagtagttcggagggaaatggccgtacccattcggcgacgccacgctaccggcggaggttggcgcactgtactcatacccggacgaattttgcgaccccaccgaggtgattcccgttttggcgctctgggtcggggattttcccgtgctgagggagttaagtgaggtgcgcgaatcctgtgtgttgatggaggcgagactggagcgcgatgcatcctgcagctgctgatggtacgcgggttcccgcatgagagaacccgtcggcgggccattcgaaaacggattgggcgggcccgctggtccctctgcgctcggtcgtccgatgagatgtggcggcggcgtagggtgcgaggattgtggtggcggggcggaggttgctgctgggtatgggagagggtcgttgccgagggcctcgtggatggatgggagggactgtcttgaggtgcgtttttccttctcgtcttcgagggcgcgacgggcctcgggcgacgagatgtaccccggcggtgcgttcgcgtaggcgtacggcagggattggccgtacatgacgttgggactcatcagagtcggagaagcggtggcgctcgaagggtgtctggaggtgtatcccgatccgtctttccctaggaaactcatcgccggcaaagggtctctgtgacgaaggtgagcaatgggagaccgactgcgaggtcgcaagaccaacctgtgcctagatgcggcttccaaagaccccatcacgttgagaggagagaatgttgatgcgacaggtctgggaggtgagaagaagggaatgcaaatgcaaagtcggaggtcgcctctggtgcgacaggaaaagcgttccacctgttcgtgccgaaggaaaaaagaggcccagatccaagatccaatccaacgatcccggggcgaaggttggaaagtggcgtttagatggagcccgagtaacccgacgagttaaccgtaattaacttcttttcttcttttcttcctttttccttttttttccgttccctcttttttttcagatcaatgaaacttgggaaatcaagagaagagataggaatccaagaccacaaaggtaccttgaaatgcaaaaagaaaagaaaaaagaacccgatcgcacatgcaagggatataaagcgtggaaatgagaatgtccatccaaatatgaaagcacgaggtggaatggggacaaatataaaagaacacaccgtagagaggggaaaggcgcagaatcaaaggggatcgaggctacttcatttcgggctttagattggaaacgggaagcttagagaggagtacggagtacaggaagttaaattgatttttgattttgaattctataaaagattaaaggaaagaaaagaaagcccaaaagagaaaaagattaaaaaagaaactttggcaaaataaataaaaaaagaaaagatcgagatccgaacagggggaaaattaccctgggaaattgccagatcgtcagaacctggttttacaaggcaaattaccgactgcggatcatcgggatcttagggctttagttatctgtgggtggtgggtagagctgtggatagaggctgtgcaatattgtagttagcatgacatacaatataattacatacttgtccgaactcatctggtaatgttcgatacattactacgatgttgatgttgtatgttgttgacccacaccatccaatatctagaaaaaaggtaatcaaatgaactgcaaaatgaactaatttaaattaaataattcagaaattagcctaccccggaacctaggatcgatcgagattaacggccgattctcaacgtgctaagggacggctgaataccggcagagtggtccatcaggaaaagaagctagcggacgatagttccagtattctggaatcagtattctggaatcaatctattcttatattaaataacaaatagcgcagggcaatcatcgagtcatttccagatcgctcgacgaggatatgcacccgtgtcacatgagagagatctccgatgcaagtgggtaaatgtcagcctcgggcgatgagctaaagtcctggggaggttataagtgaaggatatgatgtcagatctactataacatagtaatggttagatccattccctggctgtattacagatgcaacccaagtgccaaggaacacaagaataatcaagatctctggaatggagacacagctatttccatcgcaactgggggaatcagagacgtggctgaggttacacagtccgatctgaaagtgcccgacgtggtccggatgacaacgttccatggttcactcgagtttaaattattttatctctttgtttatttatttagcatttggattcattcccgttctacttgacatactaccatctacctatgacttggaatatactatgacatatacttcagatgcaatccttaagtatccaaatactacctacgtcaccgagccacaacgtccccagccaagatcgggcgcaggtgaaatcacaaaacaaaaagcaaaaaacgccgccgaaagcaattgaaaaacaaaacccaattaatcaccacctcattcgtccgtctgacacgctacccccttgagtacccgcctaaaggatcggatcgcagggtattgcaacacatgttgcttaagctttagatcgagatcgaacacgggacgtttattggcgagatcgcgtgggcactccatctcagtttaagaccctgatattacagtagagacattacagtagagctgattatatataagtgagaatcagatacggaagaacagacagtcctagcaaagtcccgcatcaaaccccgctccgatagtgcctagcgctgtctctatagtggtttggaactttgggcttccaatgactaattccaccgattgactccatgaccaactaactattccgtgcagctcgcaaaagcaccgaaggatcaaagctcgttaggaaaccaattttctggagctttgagtttgttggccacagccccaccccgttggatgtcatattcgcccttcacgcgctggcatgtggacgaatcttgtcttggctacggaggcacggagtactacaaatcaaaattctccattctctagtttatcagtcccagtccctagcggtggcaagtacaactgttatagcccgattcgcctccgtgatcgcacagcgcacagactcgggacccatagtgatgtacgatatacatcgtatgggccaacggtcggcccaaggtctaaatattgatccaaaaccggtgaaaggtaatcgcgtgagatcttcggaatatcaatgcggttgatcgacggaggacgcctgaaggaatatgtaatctcgatcagccagccatacggagtacaaagaatatatgatatcttttccatgcataagcaagagcaaagcccggtctaatattccccaatatatattgagtcagtaacaaggctcagctcagctcatgcacctcggtgtttaagaatgaatgtagtagcgtactcgcataatcgcgaatctcatcgcacaatggacttgttgacgggtccgaaatcatcgcgaatcgatctagtcagtagtcgctgcatttccagagcccaatgcaccagccggatcttacgatttcagccactctgcgatgcattccgtgcgcactggagatttagcgcatgcacggtaggtcacttccacctgccgagcatgaatgcagtaaggatctggcgctgcgattgggggggattctccacctgcaggataatggcgcaagaataatcccaatgctgaatctgaggatgagactgatcacaagagatctgaggctgaactccctgcgacggttacatttggatatagtaatatagaaaaagtacatcatacgacaagccaagtgtggctggggcgaccgtcaggggcgaatttccccgcgatgtctcgatctgaactatcagaatcgcaactggtcgcactcgcactagcccggtcgcaggacgctatgatgatgatgaatcataagtataattcctgtggttgtttttaatacgggggaaaacagagctagttttttatgtcagttattcttctggttgcctttttacggcaactgggagtgcaggatggattacagacaccgtgacggtggttttttatgggtcgcgttccactgtgaatatcacgggttttgcgattgagctagctggtggagaagacgaaaatctctgctttcggaattgaagatattcagaatttcacgtgtttggctggaggtatttgagatggccgcaaatgcgccgaaatttatctgtagtaaccaatgagatgattctacgagattatccttggccaagcgcgtcttcctcctatttacttttactttacggtacaaccgctagtaggaaaatcattgcctttgcagaaatgactttacaaaataactggagacaacggggaccactggagatgatggagacaactggagccatgatcgtagtaagttgatcgacaccgttgacagaccgttgacagcccgttagccagattccagaccgttcaaacattcctggcctcgtcgagtctgacaaaaacaatcccaggaatgttgtagcacgctatgatgtttccgaccaattgtggagaacacgcgataaacagacgatcccagactcctaaccggaaagagatgagcgacaactcattttcctcaagttggcaagagtttaggatgcgatcccaattttagtgcgcgtcgagggaggactatccctttcctccgacatcctgaacttatcaaactatatcatccataaaaggggggtaacctcccaaactatctgatctatgatccaagactattatggagaaaccaatctcagattacagattcatcaatcagccaagaataatcaagaaggtgatctcaatcccgaaaataaaagaaacatccccctcggatattataaggccagcacggttcacgtccgccgtacatagtaaaatctccggcaatagccccagtcacacatcatgccatcacccgcgactccgaaatgtggcggctcaggagatttgtttaattcgcccggtggggacgttcccggggatctctccgatctggacggagtaggctcgaaagagtaagttgacagctgcaagttgaccaaaggacaaggacaggggggggcagggagaagaaagagagggtccgatcccgtccagggattgaccaaggagagacggcacggtggggaagatggggggtttggtcttggaaatcaggacacatctgcaacgccaatctgcacgtacggcaaaggaacggcaccaacgttgactggctcggtttggggactagcagggttctgacacggccggaaagggataggcgatatgacgggaggtgatgtcctgcaagatgcaagatgtcttagtgtgtcttactgggctacagattagaccgaactcctcatcgaagtgttagatctagatatcctaaagttgggaatgtcttattagctcggtcaaattattggtaagggcccgctctatagaatcaacatacgattatggtgatattcccccaagtcatatacggagtatgggttgaatccccactggcctctatgattcaacgacagctgcacgtttcaatcgtccaagcaacagctcagggatttactccttcttctccccatgtggattataatcgacagaccgacatttagaatctccacggtgacaaaggggaaatcaccaccaaggaaaacggggaaatccagccggaccgttcccagactccaccaagcccataagatagaccgcttcgatcggcgggaaggatttcgggttttggcttgtcgggtttctcttggaagttcctttttgccttttctttttctttttcctctagctagcctaagacgggctagctcacgcgaaaggttctcctgagattaacacgattagtggccgtttttacttccatctacacctgaaataggaaggcaggtccagcatctccacaaatcccgaaagaaaccatgatcgcctgggaaatctccgagcaaaggtcggaacggactagcagcgcgcaaagtacgtgaatggtatattgatagcgtcttcacgacgatctccttctgctacggaagacagacccgattcatcgatctacgatggatattgcagccgctaagcagcatgcctgacaaacccttcttcaatctcgaacccacctcagcctaaccaggccggagccgagggccaacggagattaggttgagagattggggagattgcaactccatctgctactctatactcagccacacgaggaaatgagaagaacggcttggattaattaagatccgccggtggatcccgagtggatagcgacattattccctccaggtttccatctttccatggggctccatttctggaatatccgagattgtgttcattatatttacggagtccgttttggtgcggagctcgggagttatctgccgttgggcctgtgctggttgcaatgatatacgtactccaatgtgtgcgaaattggattttgttttttgcgggtcgagacggagcacagttgctggatttgtcttgagatttgctgccgtgtgggggggttgtcatttctgggcttgataatgttgcagtgtgcatccgttgggaggtatcaagcatatctattttaagcagatcgccgtttctttgccttttgggtttatttcattccagctaccggatagaggatggcgcgatacattatatggttgaccttcggcgatctctcgggcactttgagtcttccagatctcagtacggcacaacttgtatgagtgcttctgcaaaggcatctacgtatgatggctgtaagattgtacaacagacaaggcaatcacgtactataaacaaggttgtacatgcagttataaatcatatgcacggaaatccatccgggcctgattgagtgacggactcgcgccacatgccggtgaagctcaaaacgcttcgctattggacaggttggatgatgatcatattggataccttccccgtcgctgtcacacagaggactagcaaggatgttaggaccaaagcttcaacgaggttgcttggcaacaggttatcatatttattcttgatattattcttgatatttgcaattagtattactactccgtaggagatctttttccaaacaagtggcaaatgcatttctcaccttcctgacttgtaacatcagggatttcaatagtaacagatatatatacgaatgcgagggttgatacaaccgcgccaatcacattcatgtcccagtccaaactcaaagcgcgaatcgagggtccagtccagatgcacatcccaagctgcaggtatggcccattagagccttgacaggtgggatatgcacccaagacttttgacgtatgcattaggaacaagcctagccctgttacatatcgctttggacgaataggatcccgctggtgatctcgaatagagtttttcctgaatctgagctaccacacgccaaataggaagtcttccgctgattggagagctttgaatctgacagctgcgcggttccgacgttccgcctgaagagaatgccatttggaatttgatcacttggaatttcgcatgaacctgagaatgccatatttctcccctcgaagttgtatttttatgttttctctgtttcttcaaagacaaaagtacgaaatcctcccgctttgatctcacgtatccacccgatccttgttcactcatactccgtacttttatggaaatctccaatggaagttaacagaaagaacgggttcgccctgagtggccctcgtacgatggcaatttgagaagcggagccggccagaaattttcggttttatgttttccccgtacatttccctgccaatgggccaatgacctatctcaatgctatttttgtctcttcaaggggaagataactggccgactagtggcaatgggcccagcggaaacagatgccatcgacaagcataacccaaggatcggcaaatcgtcgaatacactaaaacacatgggctgggtccccgcagatccgtgtcatatcggttgaaaggggaactgccgtgaaaacggcggtccacggttgatctgacagggtgtggtagggtcttcacggtggggagaggtgggccagagaaaacacgcctccactttcaataattcccgatgaacgccgtaatttgatccccgataccgagtgaaggggcctgtacctaaccccaacgcagtcagggcgccggcggtctgggcagcgtgggcaatggatttacgcgcctactccttctccctttgagcaacccggcgttattttatgggcgtcaatagtacatacatagtaccctccgtgctcgagttccacctctgaagaaacttcacataaacttcgataatcggtgttgtatggcatgatggcctgatccactgggaaaagggcatccatgtgtcaccgcggtctggcgccaatcaattcgtcgcctgctggcccctccactgctgtccacgatgccaactccctgggcctggctctcgggtcgacctactccgtaccttttctgtttcggatcttatagggccaatgataggagtcctgggcccgaggcttgagcggcacagaagcgtctctttaggctaggtgcaggcggtaatgcaatgcagcttgccgcatggagtacattgcagcgggataactcgaaacagatcctgactatctcgtgcggagtgagtacaaagtacaaggtacagggtagaaagtacaagcacatggagatgggtattgtatcagaccgagtcaggttctagttatggtaaggctgttatttgtcagggctattgtgcttgactcatgagcagggacatattttcatattgattttaccaatataggataaggaaacatttgatcttggtcttattccctcttgtattgtgcttgatcttatgtatgtgtgaatatatataatttgatgcattgatgcgctgatgcatcgctggtttcaccgtaccaccaaggttgtttgcttcaaagcaggctacatatatatataccactctctatcaaaatatcaactctcctttacatctccatctctagtaaaagtcatcaactcatataaacacaacggcgtgaccatgcctcgtcgagcggcccgtgcacggagcttggcctatccccactttgagcttccagtaggacacaccttcctcttcaatttatttttaggtccagttgcgactagattttttaacgtcatgtcttcaatcctagttctggctgatattcctaccgtgacacttctgtaccgtgcaaaaaagctcattccttcgtcctcgagatttccgccatcccagtctctcaacaataccatctctatcatccgcaatgacatcaccaagctccaagtggactgcattgtgaatgctgctaatcgttctctcctcggaggtggcggtgtggatggtgcaatccaccgcgctgccggtcccaagctacttcaagaatgccgcggtcttgatggatgtgacactggcgatgcgaagatcaccgatgcctacgatctgccctgcaagcgtgtgatccatacagtcggcccaatctacagaaaggaagaagaccctgtcacgctccttcgatcctgctatcggcgcagcctggaactagcagtcgaaaatggcatgaagagtgttgcgttttccgccatcagcaccggaatatacggctatcccagtcgatacgccgctgaagatgccatcaaagaggtgcggaaattcctggtcgggcctcatgccggaaagctggagcgtgtcgtattctgcaactttgagcggaaggatgtgattgcctatgaagaattcattccgtgagtttattcatttctcgcttttgagcagatactgatgatgactatagtgagtatttacctcccacgccggaggacctggctcagagcagcgacgcttgagtagccatgctaaaatgttgctcgccttgcttggtacatgccccgacacgattgacgaccgctactacatgacctgaacgaaacataatctttgccagcctgtaataccacgatagctacgaaggagatttgctaaatattctaaatattccttgacgaatcgtaagtcccagtgtttctttctctatactggtaacacgtaaggcgaagatgagacattgaccagttcgtacccatactacagctgtcatatcagtaagtgcgatgttatcgttgagatagtcctgtaagcagcttctttcctctctgtattatctcgacgtagacaagtatcttagttacgatctcattcctgagatcgtccacaggtgaatgcaaacaatgcaaacacctatcagatcgcgcctcgatcacgattccagctcgagatgacttcactccaattccaattgcaagtctctcgataaccaaaaccgcataatgaaacacaacaaccctcactgaacaccccatctccaacaaaaccgatccccccgcaaaccccccaacccctcgccctccgcccaacaccaaaaaatgtcaaaaccacaccggccaagaggaataccaaccccgaattcacggtaccgagtgcaagtccacgaagagccaaagcccaaaatcccagatcctataacatacgagggtccatccctctccaaaaaacgaacacccttcatctcccatttcttcacgaacctccgccaacgcctctccgccctcccatacccagtccgacgagcatgtaggactctcagctgggcggtaccgatgctcccgatcgcgctcttcattccagaacacgtaatgcaggtgatgtgggttcgcgggccgtcaatgacaccatacctgaacgaggagtatgagcagacgcacacgaagagcgatatggtcatggtcaatatgtggccgtggggatctatactgccgtttaagaaagagcggaagttggagcgggggatgattgttactttccggtgggttgagtgctttgctttgctttgcttttacttcgattttgagttttatatcttgttcttttgagtcgcgtgcagccaatactgatatattacgcatagctcccctgcaaacccgtctcatatcgcgatcaagcgcatcgtcggtctaccaggtgaccgcatcacgactcgcgagccgtgtctgcggaaaacgcagattgtcccctggaaccatgtctggttggagggtgatgcggaggatccgcggaagacgctggatagcaatacgtacgggcctgttagtctgagtctgattacggggcaggtatttgcggtgctgggaccgcggatgcggtggctgaattggacggactgggactctgataaggggaagggggagtctgcgtcggatgatgcggcgtatagacagagtgtgcgggaccgtgttctgaaggatgctgttcagctcgagcagccttttttgaattgatttgttatagatggggcttggcgtatatcttggcctttgtatttgttgatagtgctggatttcctagcgattttgactgggccttgtacatatattagggagccttgtagatatcattatattactattttgagtaaaatgctgtgctatgcgtgtgcgaaaagagcaagtttgcgagaacgaaaaaataagtgaagacgaagcgctataaaacaggaactgaatggctaagaaatgcagacaaccgaggaaatgaatcagcgatctagagaaacaagccgtatatcttcatgtttctcttcctggtgacggtcaatctccgaggaaatactcatcacccaacggtccttttccacacgactacgtgttttaaagacgatggtgcggccatgcttgcccagcgtggacacatgacgcaaggatcgtttggctttgccttcttcccctatttcctgggctcggaagtagctcttactcaagggttgccagatcacgaaggtgatagcagtatcctcatcgtgacttgtgaagacatctgaatcgagatacacccgtggtaaagcatgcacaccagggttattgctgtcgaatgtctggttggcatacagcaagtcgttttcggtaattagaccagaataaatatagcaatcttccagctcgatggatgtttcaagttcttgatggatgtgtgggatcacggtgccgtttcgccggcgcagtgtgctgcggaaaattaacagcttgcctgctgtaaggatgacatcgcattggtagaaagtggtgtggcgacggggcttgcggtagagggtgccggacatctgttgatgttgtcagtagggtgcatgtatttccgatgttacgctacataccttgatagtccgacaactagacagcgagcacatgttgtgcaagtgtggagatgcctcggctttcgacacctcccacttcttcgcgaactgtccgaaaacggattccatagcttcgtcgatacccaacagcttgagattgcgctgacgtacggcctgcagctccgtggcatcgtccgcgcagcgaatgtgccaatacttcacaagcgcatcaattcgtttgacccactcgtcccgtgtggcaccatcgtacgcctgcagtcgaacgacaagaccattgtttagaaccaattcaaatgttctaccgtcgtcaaactcttgcgttgccccgtcatcccgtcgtgagtctctggtttggggattgaagtccacagcaggtccttccccgatattgggatcagcagggcagctgccacgatagacattgcggacttctgtcacccgacacatatcgatatacccatctgcctggctgatattgtgtacattcctctgcacgttcgcaaaggcctcttcatcgtgtcgtttcacgaactcacgattgccgctggagagccatttaatcttgttactttcaaggggataagggtcgatatcccaagagagcggcatttgatccaatatctcacgggcacttggtacatttccttcttctgggggatcaaatttcggcggtgacgggggaaatgccctggctggccgacagaacaacaaataatgatcttgggtaaagaagtacagccgtttgaagaacatcttgttcatccgctgatgcacacccttctgggatgtgagacggactaggaatccttcgatcggggcaggttcctcctgtacatccggatgcctgattgtagtagagtaatgatgtcttggtcgtagctcaagctcgtgggatgactgcatcccaatggtcccatacatcttctcctcgttgactccaaatacccactcaagtcggtcgtaccgcttccaagcaagtcccatcttctcggtcttggaccaagctttcaagacctcggcccactcggcacggccttcgagcatatccatgcatcctcggatgatggtagcggcagcaaacttgtcatcgacggctggccggttaacagttggattgtgctccgtatcagaatcatctgctttcagcccttcctctatccgaccgaaaggattttgaaagatgagggaaacccccagatcagggacgtgaatagggagggaggtgggacgccgccatccaagcacctggcggatgaaagtgtaccattccgcagagtgcgccgaggactttggccgaatgataaatattttggttccatgcttgcggggacgccaaataacgatggtcttgtcgagaggggaatagaagttaacatgggtatctttgtggttaagctttacttcgtaataaggaggcgttttgctgttcgcacgttgcatatcaggaatcacgcgagtgcggtacatctgaatggcaaatggcgcatgctctatagagcttttgcggcatacgacgaggaactctcgccatttatccacggtccgcgtttccatgcgcaaactgtcattctcggtataatcggcgggaagtctgtcctgcagagtctcctccacgcagaccagcattttttctgctttgacaatctctccgtcctgcactttccggcggtgcggtcgcttggcagacatagtaccttgggtctttgcaatcttatggcgcatcttttgctccttgtgtctgatgttgtcacccaggttgtattttgccaccttcgcagggagtctccgttggattcgcgcatcttcgccagtatcatcttcatcttgtgggtcgtggtgttgaagcgatgctcgagatatgccagatagcttgcttttatgcttccccttgtccgtgtccttgttttgaatcagctgagttgtcgaatcggcctcgcttggaactatggatgtattgatggttagagggttgggagaagaatgaccggccaaatttgtatgatgtgagcccggggactttggtcgcagctcaggcggttccagactgctagatcgtacggtgggtattgatcgactggtatcagggctgggggcctcttctctggcggtgacaaacgaagatgaagcaacatcattgctgtctatgtcgtattgcccccttggtctggctttgggggtgctgtctgtatcttcgccgctgtctccttcgctatccccggtgtttgctctgtcatattccccgctatgttctctagtctctgtgtcgtctgccggctctgtgggtaaggggtcgtcaccgctggcctcagctacagggtgggttagggtcctcagttcccccacaggctctgctgcagattctgcctcttgtgtttctccttcaatctcatcacatcgctccgcagcagcatcatccgtgcttgtgttggtaagtgccaaagcgacctgctcatccaagtcgggtgacgctggggtgggctgatcgttgtgctcctcgtaatgggccgcaatagggcttgcagagaacgtgacggcatgcgatgtatagtttctgactttgagtcgagacctataccaagacttgcgatgaccgtgcagccagccttctggaattggaccaacgaaaaatctccggttcgtcatgtgcaaatgtttggcagaagcatgacgctgtcaagaaatagatcagttctgcaactcaactcaaaggatggtgacataccaattgctggtctgtgtatgagccagtccgcaagccatgataatcttcatggtatgacgggcgggagtcgggttctggtcgtgagccattggccccgtctggtggagagctcatgtcaatctattatgcagtaccctggtagaccaaatggcatgcaccagacatatgcaggagcaagcagatggcccaggcacagaactttcgatcgccatgtgatatggtccgatgacgtcgctgccaggtcaaacgctgcaaacgatgcaaacaagttgttgacacttcaccgcgttggtcttgtttactctgtttgcatcctcccgtggtctccacatcccccgtgccccgccattggcttgcgtggcagcagcggtgaagtcgataatatccaagggtcccctgattaagctccttccaaggtttctctttctctcactatctatcttctacttgaattattctgtaaaaatggctgctatccctgctgacggaacatggtttgataccatcaacaagtccttcgccgatgtccctattggtgcggacgatggcatctcgaccacggagttcctcgaggccgccgagtcactggtgactctcttcggtgcgtattgttcccttgcatagacctgcctcaaactaatgcagagaacatttagatgtgcttggctctgccgctttcaccccggtcaagaatgacctgctcggcaacatcaaggttcgtccacattataccgccggtgtcaacccattctaaaaccccaccagaaagtccgtgagcgccaagaggccgctcctgcagagtctgagaccctgcaggcccttgtcctgaacgaattgaagaccggcaagcacgtcgccaccgaaggtctggtctggctggtccggtatgttcacatgtctcgatcgtgaaatggccaattgcaatggcatctcttcgatttgcacaatctgcatgaaccattgactaatcattgttcttctcacagaggcctcgacttcaccgtccaagccctccgtaacaacatcgacaactcctccgcggaactctcagactctttccgcggtgcctacggcaacaccctcaagccctaccactccttcttcgtcaagcccatcttcagcgcggccatgtctgccacaccataccgtaaggacttctatgcgaagctgggtgaggatcaggaaaaggtcgctgtggcgatggccaaggaggtcgctgctttggagaaggtgatcgccatcctcaaggctttccaggctaccaagcctgctcagtggaagtaagtttgccctggaggccttaccactggattaaacatgtgcactgtgcaacttaatatgtaaatattcgatttgggttcattccagcatgcgagtttgtattatgtagcgaattcactgttttggtcaatctacctaggtagagcatggcgtatggggtcgagatctgagcgtcgcgcttataaatcgtaagcttgcgaacgggacccttgtaagaagtagatcagtcggtctataataggacacggcaagacaactcgcagcatacgtcatagcaagcttgaagttctgctgccaataccgcgcgttcggttcgcttgctcgctctcgttccatatgcgacgagcatgtacaaccgagggcagtatcacgacccgttgacttggtacggagtactccgtacacttgagtaggtagatcagcctctatctcagccccacaggtaagtgttccccgaaatgccgaggtcagggggagataacccggttatatatctgccgttttaactttgatctgtcatatccttaccaaaatagaaagggttccatcttctaccgtactccataccgcgatccaaagttagagagaatagcctctcggcacttaggtccagagggcctgacccagaagaccccgtgcgccaaggatattctttaccgatggtaagggtggcctgagagtcgggtacactgagacccatatttgattgtgatctaggagtataagtaaatcccggggtgatcatatattgtcacaataaggccaggataatataggctagatatacaatagtattgtagtgctcatactgatacaatagcagcttgacatataggtagtcagagaatggtccaaagacagcaagattgtcgggatgttgtgggtcagaagttagtgccaggtaatttccgacacaatatactgcagatcgtaccacctccgccgaggtccccgctgatcgagtgtttcgtctcacactggtgactggaccatctgaaggtcttcccccttaagaggagacggtttgcgtatcaatcagatctcgatatcgaaactccagatcagttcatgtccatcagtccatctgttcgagatctcgggcaagtgcgggaatatcgtcaaatatttgccaatagtttccttggcaatgcatgtcacaaaccctggtcaaggatcgtctactccgtaccataccctgggattgccaggttgaggataggcgggagtgcttcccctgacgacggatggcaactttggttagggcttcccgttgtagaatggtccgacactagcatcacggtagcatcgcggtatatacggagtacacaggatcacggactgggatcttttctagcgactccgctggtcataggtgattggcgggaatcagtggagtccatgggctggtatcatagttttttggcttcccgacgtcgtattcagaacagtcgcccggcttccacaagttcggtgcgacttctctttgaaggctagattccgtctttgcatgaagaattttggttgctggaggtgttattggaagggattgccgttttgatttgattttgagttctcgacctgcttcccccacacgtgaaaccttcacggtcccaaggttccagcagctgtctaaccccatcttaaccaacatgcatatcaccgttggccagggatattgactccgtggaggcttttaaacggggcgactttcttttgcctaattacctaattaacccttttcgccttttcttttcttttttttagaaaaatcgaaacaactaggatagtatcatggcccctctcatgttgtagcccgttctcgccactgatgctcgtgatcgtaaggcttgatctgcatggtagcgggttttcccttagggtagtaatttcctctcgctaatatatcgtattcttgttgctccttcggatatccttgcatacttggtagggaaactatacgggccatgaattggtgaccatacattcattctcccggtcaagatgttgcccctcgaaggccgcagcgagtcaatctttatcgttactactgtctttcttggaatttcattcattgccgtggttctacgatgcttcgtgcgcattcgccttgtcaaggcctttggctgggatgatacctttatggtatgcgccatggtatgtatgatagtttcatgtgcacttgaaaccggactgatcgaattgcagctgttgaacatcctgttcgctctatgcggtatcactggcgcattatatggaatgggccagagatccgatgatctcgtgaagaagggtacgatggaaaccgcaatgtttgtatgtccaccttcaattccaagatgaaaatcacatgctaaaccttcccaaagtggtggtggctcggtcaaaccagctatgtgtggacctgttcactagccaagatctccatcgcgttcgcgctcctccgcttgacagtctctaatccccacaaactcgtgttatgggctgtcattgccgtcacttgtacgattggtctggtcttctggttcatgttgacgctgcaatgccaaccggttgagttcttctggcaacgagttcgcctttactcgaaccctcatgccaatgttcatggcacctgcatggagctggaccatatcatcgccatggcctatgtctacagtatcactgctacaatttgtgatctgaccctgggtcttttgccgattgccctggtgtggaacctgcagatgaacataaggaccaagtctgccttggcgggtattctgggaatgggatgcatgtatgtctacccttggaaaccctaaaatgagacttagtactgacctattgatttagcgcgagcgcagcagtcatcattcgcattcctttcttgcacgactacaaggatgtcgacttcctatgtgagtttctattcttatacacactcgataagtgagatgatcaacaactaacaccacactcccagacgcaaccaccaacatctcaatctggtccaacgtcgaagccggcctcggaatcgccgcaggcagtctggtaaccctccgacccttattccgctggtttcgcgatcccagctcggcaggaggaagcaagagcaaaaccaagcgcaccggcggcagcatacccctctccagcatcaacggaggccgctccaccatttcaggcccgcaatactggcggccagacctagaccggccagaccaacatgccgtggtaacgacgattcacacctcaaatgggtccgccactagccggtcaagtagccaggaagacctgaacccgaaaaacgataccttctttcagggggtgaatgtccaaaaaacgttttatgtttcggaggatcagtcatgactggctgtgccggagttagataggctataatatatctaaactttaatgtttccttttttgctctttgccttttgctctttgtttagaacaacggcttgtacggagtacacgataataacgtattctacactgccccgccccgaccggcccccagattctattctcacacaccgggatccacgtgcttttgtcagttatcatgattcattacggttcgcgttcattaagtacatggtatggatcaaagccggcgaaaggccggcatacgctatcccgcttgtagtaacagtcccactctgtcttgctagtggcgcatgttccgatagcagttgaaacgagctagctatgccggatgacgttgtctagcctgagtgttgctctgtgtatcctctttgcgcaggcggaaactgacatcggtaaaggcggtaatcacatcatttttgacatatatttcatttcttttagattaactggctaagcgcggcacagtttctaattcgatactattttaaatattatgttgttcgaggcttataccgatattgcacggcatggtgtgagctcccaggggcttcgtgggcctatgatattgtaggaagttgctggagctgggctaattcatccgtgccctagcctggacccttattagcgtcgttcacacctaatgaatatggcaacaatcaacaactgactaactagttactagctatatgtagttatttgtaggcacgttccagttgcagggtcagtttcgagttctactctttgtctccgatatcgctcggtttcttcatactcgtagcagcaatacatattcccgtcgtctttactccgtagtggataaggcgtcttcggattgggccgacatggtccccgcttcgttatcagatgattccccgggttgaaaactcgggattaaactcgaggcgcgcacaagtgtcgtgttgggagagccgtttgagcctcttggccgcaatgaatgaaattccacttcatccatgttttctcatgattctcgagatcactggcttgggataaagctgcagaaatgtcatcgtttcaaaaaacattcggagtgtctgctagctctgttgattgatcctcttcatccttaccggctgcttggattctagcagtacgagtcaaatgccacattagattgagtaataattggaattaaactatagtgtatgtaacgaagaaaatagtctgcgatctgattcggatgtgcgctgatagatagggagaaaagggcgagagctatctctctagtatgtacaaacgggatctggtccatgcaggcatccaacagtaactcatatgaagatagtggccgattgatcgggtcatcggccgtagccgtgaagatttctcgagtgaacctcatctatatgatatagttcatgtctttagcacagcggctatgtattttggatctttgctctcgaaactttgaaagaatgctcggtggtcgtcctagcttgcggctgggatagggagccagtgaaatgcgatgggcatcggggtcttttgccttggtgatataaataggacaagagacatatgttgatatgccagatacaaatcatgttcttcgtgtcaggaaatatagcctcaatggctttcatcaacgcctcttctttatttgtgagaatcgtagggggatattttaggccaagcgattcatacgcttcggcgagacggtcaaggatgagttcgtatgtgtcctgcttctcgttcttcatgaaggcgaacccaatatggaaagtcgatcctgtggctgcaaagccaacaatggcgagtaacggaagaccgtagcggtttgtattgtacgtatgatccattgatatgacccacaaatcagatttgagcattgcaatatatacaatattgcacaatcctggtatgcgaacttgggttgccagagtgaagttgtatgtaggctttgtgttcatcaagtcttcgcaagctttcggcctccccctttcgtatatcccccgatcctaggaaacttctaggttatgtgaggtgtactgtgccaggtatattgcggaccatgcgactttctcgacgccgatcatcctcaagcttcgacaaagggtttcgggtatcactcggtgtgccacgacgaagaagtggattatttttcagagcagaggagtagatggaaattaaagtgagagagaagtgaagtgcgctcgccaggtccagtcggtgctatcgttggggaccttagctgaatcccagcaatctcgtctccgaatgatcagagttgacggtcatgtctaagaaacattagctcaatatgaccggtagctatgtattgatccgactgaaaaacttacatttagatgtgcttcctcggtgtaagtccaggttgccaaccaccgtgccatggatgcacttaactgggtttgtccgtggtcctcatcaacggagatggaggttgacgaaagaaaggagagttgagagaaagaaagggaaggaaagagggaatgatagtgtggggagggtaattatatatgtcggatgattttctgacaagagattattgaagaggtttgcgttgccatcaaatgtaccaacaccaggtacagtataatcaaattaaaatagcattcaagtagttatacaaccctatatgacagtgtcatatacagttatgcttctcaacgggctgcaggatgcgctaagaccgccacctgcatgtctatattctaccaaagaccttgtttccgtccatggagcactgtttcgctgctctcttcaacagcccggccgggctagctcaatcggtagagcgtaagactcttaatcttaaggctgcgggttcgacccccgcgttcggctattcctaaaaccaaacctgagatttcttttttgctcttttcttttgcactttatgaaagcaagcaccgcggaggtcaagggctgagttccctgtcatcaataatgtaatgctgacacgccaaggattaaccctgaaagagaagcttcccaaagaccggactatatcaagattggaaggcttggtgggtcacacccgcttagtcatattgaatccggggcagccctggacgggataaccatgggaacctcaccctcatgcttcaccttatgatcagcaacaatgggtttgccgcctcttgactcggacattaagttattatcaatcaaaagagacatcagacactcaggcacttcttcgatttatgagatcaatcttggcagcaaccgctatgcaatgaaactggtgggtcatagagtggctctcgctagcattggacttgagcctaatactggtcgcagttccacgatgagaatggagatccaggatttgcagacaacggcagggatttgaatcggtttcgttgtgaatataacgcctataccaacttgctaaatttcgatgtatgcgaaagcgggctcgtcccacgttgctatgggtatatcgatcgcctcgatccatcctcttttcgcccgcacctcgaccatttcttaaccgatgaaatgcatccgagagctatcatactcgagtacttagaaggtgccgaagaattaaactgtgttaactattccgaagagcgtctgcaattggccattcaagggatgaaggaaatccatcgcgctctcatcaatcaccatgatgtttatccgaaaaatatccttattgtacctagtcgaccggagcgagtggtgtggatagattttgatgttgcaatgtcctttaagacacaagattcgatgggacggaaaggacagttggaatgcgagcatgaagccaagctgcttgctagctttggagaaatactggtaagtcttcccctcgttcaacattgtgcccctataattatagaagactgatatacgttaccagcgcgaggatcaaaagcagggtttgcctccgaatacaaaattttattagactaggatttgcataccatcgtggccatgtctccctaggtgcaatcttataatttgtgcacctcgtaaatgaataaatgtggaggcccacagccaggactatatagagtgagtatatacttctctggattatcccgtcgacaccgacagttactttgtgacgtcaatcttggagttaagagggcactaaagtaagttccgtgtcatcagtatcaatcccaaaaagcttcccattgaacagtgatactagacaaaagacatatatatcgcaattatatctttctctttttatcgttctttcacactcagtcaaacaacaatctcaattccaccatgagctccgttcaaaaagttgatttcctcagcagaggaatcaagctcgttggcgatgtgttcctccctcctgggtactcctccaataccaagtacccggcggtcataatcgcccatcctatgactggagtgagagagcaagccccgcatgtttattcgaaagtcctgacacctgccgggttcatctgccttacatttgacgccgcctaccaaggcgaaagcgagggccagccaaggtatctcgaagacccagcccaacgagccgaggatgtcagggccggtgttacctatctttctctgcgcaaagacgtcgacccagaacgaattggagctcttggtatctgtgcctcggggtggctatgtgccattcgccgcgcaaaatgaccaacgaataaaggcagttgcaaccgtcagtggcgcctgtactggccgaatgacaagagaaggccttgtggaaggaatgggaggtcccgagatgctgcagcagtcgatcaaggctgcaaacgaggctcgactcaccgaagcgaaaggtcaacaggatccagttagccctgcctttcctccaactgttcaagatgtccccccggaatacccacccattgtcaaagaattggcagaatagtacaaaacaccgcgaggtcagcatgaatgtgcacctggtctgtttgcaactagaagtgcggatcttttggcgaacttcgacgcctatgctttcaactacctgatttcgcctcgtcctctttttatgatttctggcgctgacgctagcacgaagtactacagcgaggatgctatgacgagcgctccttgttcaaaaagcttcggtcgacggtaggcccaatactgaatttcttgtatactcgctctttgagttcagaggaaactccgctggtgagcatggctggaactgcaccttccactgcatcgctcgcgatatatgctgccaaagctgacgagataatcagattacgcatgggcttgtgaatgagcgaatggacgtactgcgaaaatgacaccgcaagcatctttgactcgatagtcactagctccctcataatggaaagctttttgtccggactcagctgatcccaggcgactccaagctgtgtaccagatgcttcttccataatgatgtattccgagccaacggcgttatttgatgtggcactccaatcaaagattcggggcccgggaatttgaaggacatctcgagtctaggttaagcatgaatagccgccgtgcgattaaggttcgaggtaaacttacaagctccgtggtagcgacctcggacgcggtggaatagaacgctgggccggcatttgggtttggtatacgagcaagcactattttcccatcattcatgatcaaacggaaagactttgttatatcctcccccagccaatttcgtcatggagatacagctgtctgattgaacggctttggagctcagtaacgttgaaggccttatacctgtccttaagctgctgttcttcaccccagagccattgtctactcgtataacgaaggaagtcttcgtaatcaggatttggtgttgtcatttgctcggagagattcgtgactgtgcgaacgacgcgaaacggaggaagggtagtggtcgttgattgtaaccgtgatggtcctgaaatgagggacgtccgtggttgaaaccaatgtactgaacagtttctcaactttggaaaggctgaaagtgcacgacgacgtcctgtgtcaatgttcatcgctacagtacgtaatgtctggttgggaacggttcaaacatcatctgcgtcgggcgccggaggacgtgtttcgctcaccaggtcaccggtattgattatacctatattgtataccctgctggtaaataccagtactgtgtgacctggtaacctggtaaacccccattcggaggaggtggccgcccgagtttctttacttattagagtcacataactaactaatacctaggcattctataaacttggatgatctagttcccaatatcaaagataacaaatgaaacacctgtaataatgatgggatcggtccccttagtacatcacatatttgatgttggacattacggtgacgcgctttcaagataggccctaggaataacctcaatttccgccagggggtggacctttatttaacccccgaaacatcttgatagaatcatcttacgctttttttttggtttgttacagtgctggcattgtagcatgtcagaccaggccttgtcttctttcatctttcattttcattgctttgctcctttgttccttattcacacgaagctactaactataacctatataaatcgcttcatggtagtcatagtaggtagtagttatttctgtcgttggcatatgaattgaccccaggacttgtcatacctctttgcttactctccaacacggactgctacgtggatcatctctcgactaaacgatataattgctacgcttcgctccgaaatcaccttgggatttcttcctcatatcaactcctttccacgcgatctagttcgcatcctactgcggcaccgtttcaataccaattcctctataatattcaccatggcaggatttcgaggctttagtaaagctgtgaagaaatatacacttctttctctatggatgtgtgggcaagtggtatactttgtgatatatgtttgcgccatggtggtgattgtttgctctgttgtggctttgtgtgttccattgtccattgttttgtcataggttcacgactcctgcgcgaccttctagtcaaattgaattatccaacatggacgtatacaagttgacatctagaatacctattaattcatccccgaagtagatgtatagcaaagccattgattgtacggagtatatatcctagaaagacccaacgcccgatgctatgcacatatcatcgtaaaacaaagtgctcgaactccaaaacattagaaatatagaaaagtggaaacgagagtagacgtgtgggaccaaaaagaagtaagggaaatatatgtgcaggtagcgcgtgtaaacgaaaacaaaatattacaatcccaacaattaaaactcaagtcaagaacttgcctgcggatgccccgtgtaaacaccttcaaaatcaagaccagcgagcatgccattaacgcgatcgatctcacggctcaagtcctcgacgttcatcgctaggctgcttacttcatcgaatttacgccgccggttggcatcggcgatcatttcagacacgaagaacttctgctcttctagcacaatcagccggtctcgaagagacttctcttcggcttccaaggccgagacggcactgctcgtgtcgctggatagactgctattgctaccgctagcggcaatgctgttgtacttaatggacgaaagagcagattctggtggccggagacctgtcgtggagccattaaccggagtactgggtgagcttgtccggctgggtattctctctgacgcgggggttgtatgcttgaggattttcgggagggatttcaaaggtaacatgtgaagatgaaggaagttgctggcttgctgatatatagcctgctgcagcttttgttgcgtgggggaattggtcggcatatcacggatacgtcgagccgcaacattatactgtgcaaaagaatcaatcagtcgcttgcgcaccttggatgcatctgcaatctgagctgacgatggaggtcgtctaggatccctggtacaatttcgttagtaagtgactagaataccagaacagaaaaacatactgtaaagctgtcaacagcttttggaatctaggtagatgaaggcggatgcctctctcaaactgggtcaagttttcatacgccctgatctccgatggctttcgcgtcatgtccgctttgaagtcgcgtcgatcaaacagtgtcgatttgcagtccttgcacagtcttacatcaatattgacaaggttatcgccattggttttctcagaggtggctgtcgggcctattagaacttagatcaaagccacaagtgagggtcgtctcgggacttaccaggagaaatgctcagcccaacctcactagagcatccggtactcggatcaccgcagacaattcgcccgcaagttctgcagtggtgtctgcgaaaagtatagcccgaaaattcctgttggcaaaatggacaacgtgaaacactggcatcatcctgccagctgacaatcgtttgctctatttccttacgccgatcattctgccatgcaagagaccaaagctttgttgcactggggtgtatttgatctggtggcagactagccaacagctgagtgagacgggtcagtcgtttttcgagtcgggagatttccaaaaactccttatcgacggtctgttttcttattgacttgaatgcatccgttcggtccctcacgattcctgttgcctgtttagcttggttcagaattgaaagcaatgtactcaccattatgatcattgtagccctctcttgacttgtagcaggtttcgcatactcgggcccatattcctcgtacaggttcatgatgtgccgcccgcgagagcttcatttggtacatcgtgtgttcttcgcaaaacagtttcccgcaactccgacagttcacgcaaccgttggtggcgttcaatcgtttcccacatgatggttcaagacactcatcgtaaatacaacttgtctgccagtggtctttggttatgagatcctcggggtctagtagtttcggaggttcagggatgcccgcatgggctgctagtgggcggatagggagaggcgcgccctggttctcgtttgactcgaacacatccaggcctttcaacttctggtttaagactgcgagaggctggaacttccttgccttttccatttgaactttgaaccagtcctttacttcatcttggtggctctcttccaggttctgatggatgtcgtcgagatgtctgcggcaaatcgttaatcatagttaaagcgtcacaaggggaaacaatagatcgatacctattcagctgcagcaaagtcatctaaatagaagttagtatcatcccattacatatttacaacaaagagcgcatgggaacaagcataccatctgttcgctgcagatcggacaggagagctgagcccccggagcagccggggcggcagatatcgaagtgtcgccattctctattgaaatgcgggaagtgaggtcttgagtttcggtcgagagctgtgatgcggattgtgagtttagggaaacgctgctggcggtcggcgagagcacccgtggcttgggctgcggggacggagctgatgtgagagcgcttgggttgcccagaacacgacctccacccagcgtcctccgcgacatgatcatgggggcatgagaagctggaatagaagctgtttcagcacaacatccgttggctgtacagaacaaagttggagttgaccggagggaaatgccaattatgtggagccagccttgcatgtggctactggggccgcctgaggcatcgacgccaagagccccaaatgagatttgatattcgttacgttcatagatatgaaggagaggtgtatattgttatggatttcatttagtttagacctattatatgaaatgaaagcattgtatatccctttttaatgtccacaccaaagccaaggtcatctagtagtctatttcctcttttagcagtatactccgtacatccgtggcgcgtcatacaacatacaactacaaaagataggaaagttttttgagatatacccaatttattttatttgcattctgtctgatttgaattgaagccataccttcgccaacaatgaaaccagactagttgagccgagcagtaacgacagacaggaacaacaagactgtaacgacagacggaaacaacagctatagagtcgctaaaacggacaacaaatcaggctttttttgtttttttaaccttttcatctttttttcctgttttcgcgttttgcttcagttcatacaggttcgtggtctcatgccgtcttatatatacaagcctgggtccaaacccaacgcgaattcttcaaatattgagcccttttaccgctcatagtcacggtggtagctggtaccagtgttggggttgtcgtattccttgtggacacgagaggatccgtcgtcaaatcggtcaacgtcgcggtgtcgataggtgccactatcgttcactcgctcgcggtggtggcgccggccagtaggggtgtcgtaatcaaggtgttggtcgtaggcaccggtctgggggtcgtaagttgtggtgccgcggccggtgttggtatcgtaagttgtggcagtcgcatttgtaccgtagccaactgcgccatagtcgcttgtgccatagtcccgtgtgccgtagtcccttgtgtcgtaggtatcgtatcccacggggctgtaggttgaactcagggtatcataggttgagcctgcaggattgtaggctgttcccgcggtgtcgtaggtgtcgtaggtcgtggaccaggtgtctccgtagttggtcatcttgacgatgtgttaagagtgataatattatttgtgtaatctttctttttatggaatgtaaaaagcaccaggtcagtctgattcttataccctcgtcgtggcgctagatcccaggacgatgatactgccctgacatcactcaggcgaccatggacaagtgaggcaatgcggctgaatggacaaagaagataactccaagtcgcatatctctggaaaaggttctgattgatcgagtttgctgcggctttggttccagactgttgcctcagaaggcggatgatgatggtggtatacttctataccccataggattgacagatgattattgaaccccacaagtgccagatatttaggagtttctgtagatttccaatatgataccatgaattggctcgagagagttctgtttatttcgttctaccaagatcgtattcgttgatcgagaccgcgagcagaccttggggttggctcaacacattaggtggagttcgaggatgaagtcgtgccctcaaatagacataattatgggtgagatttggatgtctagcaaagaacaaaatcgctaaggcaagtcaatagcaggaaagaacaccattagacatcatagacatatcagagcacttcaattatactatgttttaggtgtacagccatccggttggctctatgctgatgtcgactcccacctagtcacaattacaattagctatcccgaccgagaggcaccaatgaatccgacaggaattcagtagcgttcatcaggtctgtgcttccataaacaactctccggcggtttccaggtgctgcacgttgagctggcgcaccctcggcacccggttggccatttgttcggcgaacccattcctgcaagttgccgtactcctccatgcttccaccaccaactgtaaagacaatagcctcgctgaaagcttggcggcgctgtccgaagctggcaccggtgccagggcctgcgctaccaatgccaccaggcatttgcgggtttcgcgatgcggatgccggaggcatggcgccacgtgcgttcgcgctcctcgggtcaaagtagaggtagttttcggtctttgcaatggcagagcttgaagctgcagccgggtccatgatggactcggtaatcttggtcacagtgagatccttgttcgctggtaggaaattctttactcctgaaatgagcgagtcgaagttggcacctaaagcgcccgaggtaatgcgatccgtcaggcgatttgaaagtgaggagaacccacggaatagatcggacgattgttgttctggtgcagatgttgtcatcatggtcatacgcgtgatctcgcgcacttggcggacataggcaagagaggagatgtcgggcacgccggctcgtgtcagggcctcttcgaactgagtcatttccgagcggctgagctcagtttcagtgctgaggaaccaaatcacgaacaagcgcagcttgtccaatggttcacttcctttggaaggatcactgattaactccaaaatctgtgactttgattgtttggtgatggtctcttctagttcgaagaagttgtccaactgccgatctttgatacccttgagcagtgcggtggcaatgttcatgtgcatatcaagaactgccttgcgttcccgcaactcagggagcagtgtgatggcggccttgagatgttgcgcggaggcactggtatcattctggagatcttcaatcgaagaggctcccgtcttctttgtaatctcattcgcatcttccttgtaccgcgtaagctcagcatcaatatcctcagccacttgggggaatggggctccggcattgcgttgccagaagaagtcggtactgttcaagtcataagaccttttggagcccttagcttctggatcgcctgcacctgcatccacagtgattcgattcaaacgcatttcaagaacatcctggactagggattgatatgtccacgagtgagagagcattgggactagatcaatgtttcgatccatgatgattagtaccggccgtgctgatggcactcctggcaaagcgttttgattgcccgagaagaggttatctttggaattgaggatgtggtctcgcagtttccgatccagttttgttgcgatcaattccgctgcaccacccttggggcaccgtatgattgggatactacctgcgcagccagtcagaacttcgttcgatgatccaagataggatatgatacttacccattgtcacgctcacactaaacaagccactaaccactttgtcaacaatcccatctaggtcttcatcagtcgtttttgggctgttgatcttgtagtatgcatcctttccaagccctaaactgaagaggtccggttctgccacaataaagttgagatattgatcgaaaacctgcgcaatatgctcagatgcgccagaagtgactatttgagaagcgaaatcctcgagaagtggccgcgggacggaggataggaagttcacgtaggctggggagtagagcccgtgggaaaggtcgcgagtgatcgcctggatattatcgggggttggttccacgaaatatacaaccgggacatctggaatagggtatctttgtgaatgaaggtttcttggagtcttcgttagcgttggcccagtttagggggagaaggcggcgaccatacagatgaatagttatgccccatgcccggaggtcatttaccctcaggacactgctgatgacatcccggcccatattatcgaagaccaagaccttccatatcgggtcaccatcttcattcaaaatcggagtggagtgtgagataagaccgccggacccggactgatcgatggtgttgtcttcaacaggttgtggatcatgattcaagttcaataacttttgaattgatgctgaaagccagggatcagtaaaggtcaattcatttcaaaaatctagcttgcgtcacttaccgacctgtcggtcccggagggacatggattgcgccatggcaatagttggcagcgctgtgtgagattgggagaaatgctcggtttcaaccaaagcttggaaaggtacagagctgcgcaggaagatagctgaaatatgcgcgcaactcttataataatgatgaggttgtaccttgcactgttgacaccggggttcttgctatcgctccacctggcatggatcccgctctgagctgcgctgacataaatattgcaaacactgcaaacactgcaaacattaaagatcatatgtgtttaattctgccatgtaacacaggggttgtaacttacacggcggtgggccaatgaacgaccttcaataccacaattacggtcaattttggtacgccatcgtaccatcggttaaccgccttgccagcagcttttgtcccttttactctcttcttcaaaccaagtcatctactctaaccatccgtcaacacctttcccccaatcccttcttttttttccgtaaagcgaatggctgtgacgctagattggcccttcgtatgagagccttttacttctctgattcctcaaggacactcttttgggacaaaacttaagaccgagaaaggagagcgaaaagccggacaacaggaacggcccaagaagagaaagcaggagatacaaagtcaagaacacaaggagagaggcgccggagaaaaagctgggccatcttaatacttctacgttgtatttgcaactgcggagccttcgtcattaagctgcaaggccaaaggtaacgccgtcagctcgcggaacaaagtttgtgcctgaggcatacaccgctttaatcctgagtcaaaaccaaaagcaatcgttgttttctctcataaggtacgacagtactcatactgcaactcttgaagtccactctaggcgtatcaaacatgtgaattgtctaatccttatcaattcttcagtccagcagctctacaggcccctgttctgccgtcgtgagacaaccagccaatcatctcacttccctcaccggaaaaattatttatccctccgaacctccgacccacttcatccaaaattaaaaggcggtgagcgccaaaataaactccaagccctgtccaggcaggtgcatgcacgtgattacgtgaggcttcatagtaacttagagaagcttcgactgagcttcaccatggagcaatcagctcaaacccctattcaggggttatctcatgggaattcactacctgctgattactggagcacacttgaccccgcctaccctgatcccgagcagcagcttcagcagctatctcaaccccagcaccagcctcaacagcagcacgattctgcatcgcaaccaacacctcttgggatcggatgggaccatcctgtttttcaacagcagccaagagagctagcctcacgaccagatccgaaccatggcatttactcatcagtgcatcagccttggcagcaagcaaatcctttgcaacagccaccgcaacgaggatatggagcttcgcatcagtatcagatacattcccaagctcctcatttccaacaagatgggttatcttttgactctcgtcccctgagcgcctccgaatcttcgtcatttccatcatttccctaccagcaaaattatttccatccacaaaacacacacatctcagtgccagacacatttcctgaagcacccgcgcagcagagaatacagccacggcaacagcaacaaccccagtcgtcaatttctgcatactctttacctcaaagctactcctcggaaatgctggtaagccgaccctaaatgcccttcgtggtgaccgtgactctaacttgaggcagcaaaacacaattgatttgaccaacgattactccgattcagacccgaatgtcaccatcaacccccagttcctaaattctatcccgcaggcattcaatccacagcagtcttcgttgacaaacaactttattcagggaattcctgcagacctcaaacaacaagggagcgaacagtaagttatcactttactttatggatgtttaaaatgcacttgctgatttttagaaggggtaggcaatttaattactaccagcatgatctttcagtccagtcgcatatggcactaaatggcaacccggtgattccacctggaggtatgtgtagaccagttgaaacccattgtgttagacttaatactgactttcataggattaccagtactgcaagttgtagtccccgataagaagggcgcttctaataagcagcaaacgaagaagacttctcaaaatggccgaatgagaactttatctaagtcagaaagtgaaagttcggatgaatccgatcttgagattgaagcacctgacgagccttctcctatccctccgatccgcccgactgagcccgaggctgcagcgcaatatgataccctccaagccgtgtggtcaccgaggaacaaatggcctggtcctgagaaggtcaagaatgcgctggtagcctacaaagagcttgtcaaaggattaagagatgcgtggaaggaacaagttcaggccatgaagctggctgaaaaccaagatgacaaccagaaagcaacacaacttaaggagaaagtcacttcgcaacgtcgtaccatggataaaattgcgaccacgacactggaaatgggtcatcccaatattgttgagaagtatgtatccctctcctctcccaacccctacatcttccctcccttccatctggctgtaatggccacagaaatcccgaagctgtttgagaaacctataaatattcttggaagcattggatatgaaagcactgtcacgggctagaataaaggctcatcgctctattcgccggtggcaaggcttgattatacatgcgtgtcctaagtacatatataagagtatcagatggagcaaaatggttccatcatatggattctcagatatgcccttcagaagctatctgtgaatctctttggggggaatctctcctatctagaaattggctcaaacttgcagctttgtgtgccaaaattcttgaaacgttatagttgagctcaaatgactgatcgttaatttcatgtaggctgggagagcatcctatggttgtggcggctttatattcgttcttactcgatcgtttccaagcagcagactttgctgggactctgactattaatttgctttcggtaagtttaacgtttgtctcctcttgtgtcaaatgcaatggctaacatggaataagctcttctcgcgtttctcgactttgacagaagacctgatgcaaaagaccaatctttccaaattgttgccaaagtttctcaaaaagggtggccagcaggttaaggacctcacacagaagatattggataatgctgcggcctctacgaagcgtaaacacgagagtgaaaagtccgccaaggaagactctcatccaaggagcgttttagcagatcagcctaaaggagaggctggagtgaagcgaccccgtgaggcggatagcaatctgcagcctggcacaaaacgaatggcagttaccaatcccttgaaggatgtgaataaacatgcacccgcaagcaatggaccggtcaaaggagcacaaagtagtaagccaaccggcgctgcagtgctgcgccctaaagccaatatcgtggcccctaagccaacaagtctctttggcactttaagttcggcgtccaagagacccgggaccacaaatgcggatagggctgctgccgccgccgcagcaaagccaacgtatgtacccacgaaggaactgtttccgaagttcatctgtactaacctttcaaatagtgctgcttccgaaaaggaaaagacaccagccccaaagccatctttctcatttggcgacattatggccgacttgaacaaacccaagcaggcaccaagccccaagcccgccgaagatcagcccccggagactgaagctgagcgcaaaaacaggttgcgtaaagaagagcgccgtaaacttcgcgtgacctggaagccggatgatgctcttaccgaagtccgactatttacccacgacccggatgaagaattaggtcccggcgatgggtcattgcgctcacgaggagacgttaaaggtgaaggtagtgttctcaagcttcacaaagatatggacgaattggaagaagaggatctcggtgagaccgtatttcaagacggttatactctttcaagtaagttattcttccaaatgcatcttaaattcttactgaccattatagtggtcgatttcgatttcgaggaatcaaatgatggcagtttcatcaagcgcggcggcactcagctgcccacgagtcccgagagggaggctcaggagcatcgggaatctactacccttatggtcttctatacctctcctgctgacatgcccgacacaccaaaggaaccaccagctcctgaccccgacgatattgttaccgatgtattgcctttcggagagttgcccgacctggtcaaggtatgctatacttctgataacactacgatccaatacttacaaagacactacaggtccgccaggaacgttactactcctacatgaatcccaagcctacgactccccaaccaacccaacaaccgcagcgacctactcccggagacagtggatttgacatctccaatttgctcaagatcatccagggtgttcctggacaggcgcaaccaatcccagccccgcaggcaactcaacccgggggcatgccggatctcgagagaaccatcagcatgttccgtcaacaacaacctcaaccacaggtccccccggctccaccagtaccaattccacagccgcaaggccttgacttcaacgcgatattgaatgttatgaaacaaatgcaggcgccgcctgcatattcccagccccagcaatcgcaatcagcaatggcacctaacctgggcgccatgttcgcacaattcggtgggcagaaccaaaacggtgctctcccattccgacagcaagggcatgactatgaagacccagagcgcaagcgcggccgcgagggcggttattatgacgacaattctaaccccgaatcgtggagccgctcgaaacgaaccaaatttggcgccaacgaggccaagcctgtaggtacactgcagcatttttttgataagcagttggctaattcttttgaaatagtataaggtgggactagttgcttgcagattttgggccgagggcaagtgtcgcaaaggcgacaactgcactttccgccacgatcctctctaaatcaacacatccttttcgactgatacccttgtactgccgttctctacattggcacaatctttttttctcatatctatgcattactacgttccttcatggtttctttactattttttactgggtcatggaaatgtattttacaactagaattctctggttggcgttcatcgcacggttgcgttccaattcatggtctgggatgtcagcacatattgattcgtcctctgattttcaaaatcctttgcatgcccccccccacaagctcaggcgttctctttttttttctttccacttgtttcgcctttgtttctcgcttcgcggatgcatttagcgagggggtccccagatctgggggctgatattatggcgcatggatggagggcgatgacgaacatgtacaattaggtaattttatttttttcttcacaggcaagaaccatcttcggcgcaatgtcttccatctctagaatggtccgcttggacatattccgaccgtaaaggtggcgttcctaggagggagcgaccccgaaccgtgggcgtttccccatattccctcactggtcgaaggcaactgcttttcctctgcaccacactattggcatttcttcgtgccttcctcgttcagaaggcactggatcggaaatgcttcggagggattcgcaatatcgaagtttttcactgaagatcttaaaacacttgatacaccaggtgtttttcaactggattctccgggaacgaattgtgggcgacatacttcagatccacggaggttatcaatatgtgggaaaggagaaaggatacctagggtctatatgcctcaggaaacaaagaaaatgcatagccacgcttgcaaagggaaggtaaagtacggagtacttggaaccaaatttttgctttctatatcgtgaaatactgccgatatctccccgattctttgttttatccttacacacggacgaggacatccttttgggaaggacgggaccaatatatggacgatgtgcttcgggcggttgagctcggtgctacgttcaactttggccaactggcacaggcaccggcctgtctgtccagtctaacccgcatgaagggccatgaccgcagttttcgactccgtttcgtagaacaactgctcgatattgccggtaccgcgaggcacctggactggacatatgcctgctctacttggccgtatacaggatgtgaatgcgttggtgtgtaccctgcattaccttgcccaggttatgagtgcgacggacgttacagacccttcagtggttgatatcggagtatgtattcggctctgaagcaatttgttgagagtgaagagatccgactatcttggagaaggtcaacgtgcctgatagtgtggaccggcagttgctttgaccacagcctcgctttgatgtatagttgacaacgatttagcaattctaccgaattttactattttacctttcaactttcaactttatagtacacgttggatcaaatcggacggtttgcggtctctatgatccaaggttgacgatgtaaggatatctagttggtttgtgatttttgagacattatatacaacatatcatcttttttggctatcttaacatgcctccggcgtccttaggccaaggcaaagaaaatattccgatggcttcagtccgcagacaagaaggagaactctttctgaggtggcgtgcggttgaccgcccttctcttcgcctcactatcgagggcacgaatttagaagctgaggttgttcagccatcctcaataattgtccatagttcactagcatcgtctatatgtcttgcattgtgataaacccgaatccattcgcttgatcagccaagatccaccagtatgaccgcaaatccagatgccaactttgctatatgcaaccaccttatcattgtctgctgccatgctatttacaccggaggcccaaagcttggggcctcagagagcgagtggttagtgtgaaatgatcttttatatgaaagataccatctaatgcactgaaggcttattgagcccttccagaagggagaaacacccacattcatcgatcatgtcaaagctggattgaaagctctagcagaagactctcatggcttgcttctattttccgggtaagggtttctcatcatatgcttttcaatttcttttcgttaatccattgcacagagggcctaccaagaagcctagaacagagctcagtgaaggtcaatcctacctggtaagaagcctgaattccgtacaaccgatcatccagaaagctcatatatagcaacattcagaacttggccaaggataacgattacttccgagacatgtccactatctccacaattgacccatcaagaatcatcgcagaaaccaacgccacggattcatatcaaaatcttttgttctctctaatacagttccggatacacacgggcatttatccacagagagtcacagtcgtgactcacgagtttaaacgcgctcgattcatgcagtgccacttcccagctgtgggactgattcctgttggcccggaacaaaaagactatatgcacaaagttgctgtgataggtatcaatccaccagtggaagttactccactagagactttaactcggggcgaggctatgaatgggatcgggctttggagagaagatctttacggagtgaacggggatctagtagggaaaagggcgagacgaggctggtcccctggaatagaaaacgatatattctctcatctgggactggaaaatgtggtgtcacatctaatccgctatgatgggcatgaccattgtaataattggttcccgaagcgagagagcctgccttggtcttatactaaacatgatacaaccaaggggccttgatgttgaccgaaacaaatatgcctctgacatagataagtggaaaaagtccttgatcctttcccgaaacgccaatccgtagtatccttcgtatttgatcataatgtgtacccgggagcttaatccgccagccggtagctgaccagagttccaactcggtgattgtttgtgctgaagctccttagttgaaccttctctgcgttcttaatttccttggcatcactgtcgccccattccaccggcacgtctgaatctgcgtcggcatagacaagtacattgaaggtgcagtcaccatcaaggacggggagaaaggtgacagatgcggtgatttggcggaagatggcttggatctcctcctgaatttgtttttctgtcttttcgataggttcgggggtttttgcgtctcttcaaagcgtaaagatgttagattagtgggatgatcaagatgacctcacggtcgacggacttaccccgatgtgctgttctctttgtcaccggctttctgtgagctcttgcttttcgaatttttgccgaagacttcgacctattccgtcacattatagttagccacgggcttggataagagagtgttgaatgcatacgtcgaattgccatctctccacatgttcgccggtctccttgctcgtgataactaccacaagcttcgagatctttcctccctgcatccattccttcaactgggacatgatcttcttgatgtaggctttgacctggtcgtcggccgaaactgctatgaagttagggctgtcgacgtcggctaagaagaacacggttcacgaaccgagcatattgaggccatattttttaatactattttcaattagcttgctgtattgtagtgggtaaagatggagggcatacttacgtcgtgaaatcctcgggaggatagactcctcgttggaagctgagcacccaatgcgatcagccagtgtcttggactgaaaacgtctgtaaacttacaggattgaattaatcgagtattcaaactgagcctgttagtactcagacatcattgacgtaatctaaaggacgactcacgaattcggagacaagcttggccgatcctgttatcttgtaagctttgtacaaccacgataactgcataagtagacgagaggtatggacctttgatcgacagcttgtgcacctttgactttcccttggtttccgacatgatgaactcgtagataggcagctgcggactctgaaggtgaaagaaagatagagccttgtttacgtcgaatggtcaccgcagcaataaacagtcaccgcccgcgcgtccgttttttctccgcaaatcgtgacaagtccaaccagcactcaagtgctgatcgattgccccacggataaacttcgattcgacgcttgcataccatcagcccctcctatgccaccgcagaagtcccaatgcgaggatgtctgcagttaggccgatggctgagcgcagcgccgagatgccaggccgcgagcctccgaccaccaactgtattttctttgtataggtttaaaaggagtttctctactaccacgatttactatggacgttcgaaaattgcgcatataaaactcgacgtaaacctcgagaagagaattgccgcgatcccaatcgaacgttttcgcaatttctgcatcgttgcacacgttgaccacggcaagagcacgctttccgaccgattactcgaattgacgggcacaattgaagcaggatcgaacaagcaagttttggacaaactcgatgtcgaacgagagcgaggaattacggtcaaagcacagacgtgtaccatgatctacaactataaaggcgaggattacttgctacatttggtcgatacacctggccatgtggacttccgtgccgaggtgtcgcgaagttatgccagttgcggtggagcaatcctcctcgttgacgccagtcagggcgttcaggcgcagacagtcgccaatttctacttggcctttgcgcaaggcctcgaattgattcccattctcaacaaggttgatctcccctcggcggacccagagcgggctctggagcagataagaaacacattcgagattgatacagaaaatgcggtgatggtttcggcaaagactggattaaacgttccggctgtgctaccgacggtagtggagaagatccctgcgtaggtttacccagtggcttcccaaagcgctatttattttgctaacttcatgctagacctatcggtgattctaagaaaccacttcgtatgctcctcgtggattcctggtacgactcctacaagggcgtgatcctcttggtccgtattttcgacggtgaggtgcgtgcaggtcagcagctcatctcctttgttaccggtctcaaatattttgttggtgaagtcgggatcatgtatccgaccgagaccgcacaaactgttctccgtgcaggccaggttgggtacatctacttcaaccccggcatgaagcggagtaaggaggccaagattggtgatactttcacaagagtcggttatgaaaagatcgtcgaacctttgcctggattcgaagagcccaaatcgatggtctttgtggccgtatacccagtgaatgcggatctcttcgagcacctagaggacagcatcaaccagctggttttgaatgatcgaagcatcacagtacagaaagagtcttcagaggccttaggtgccggtttccgtatgggatttttgggaacccttcactgctccgtgtttgaagaccgcctacgacaggagcacggcgccagtatcatcattacaccaccctccgtcccagtcaaggtcgtgtggaaaagtggcgccgaagagattatcaccaatcccgccaaattccccgatgatgatagtgtacgactcaaagtcgccgaggttcaagagccgtatgttttgtgcactctgacgttcccagaagagtacttggggaaagtgattgagctctgcgaagccaatcgcggtgagcaacaaagcattgagtatttcacatcgactcaggtcattatgaagtacgaagtgcctctagcccatttggttgatgatttctttggaaaactgaaaggaggtaccaagggctatgccagcctggactacgaagaatctgcatggcgagctggtgacattgtcaggctacaactcttggtcaacagggagccagtggacgccgtaacgcgaattatgcattcgagccaggtgaaccgacagggcagaatttgggtaaccaagttcaaggagcatgtcgaccgacaactttttgagatcatcatccaggctgctgtcggtaagaaaatcatcgctcgtgagactatcaagccttaccgaaaagacgtgctggcaaaattgcatgctagtgatgtaagtcggcgacgaaagctgctcgagaagcagaaagaaggccgcaagaggttgcgagcagttggaaatgtcgtgatcgagcacaaagctttccaggcattcttggcaaaataagcgtgtaaattagcatctaaatacattgtataacactatttctgagatattttctcttgtattaagacattatacaaacatgcgccactcatgacagcggtgagagctttaccggcagaaaaaaagttcatgtcaagacccccgccatataacttcttcctctactcattctcacttcactttattgtgtcaaaataacctcgctcgatatctgtggcttctaattgcatacataccacaaaatatcagagttaattcttcttcgagcctgaaatctggtctggcggctgacgtccgcatatgccgatcgcatcgctttgagtcaccctgccatgctccgcacttgacacggccatgcagcctccagagggtgcgcaggtagacctgggcaaggcccaggttattgacagcgttcctaaagtgatcaaggaactgaagtttggtgtcttgtacgcagttcattcacatgtgcttgtcacaagcgtttgtcgcagacttgatcgctaatgaatatttatgttccagaaccaatgatgatattgttgcccaagcagtggtggaagtttccgaccgaaagtttttcgacttggatcagacccgaacggtcgttgcgaatggacctctcgaccagcgcatgggtatctcgaacaaaaccgattcttgcgcaacatgtggaaacaacctcaaagactgcaatggtcattttggccatgtgagattggtcctgccatctttccacgtcggttatttcaagcgcgtcatttcgatccttcaggaaatttgcaaggaatgttcgaatattctgctccccgaggcagagcgccgtacctatcttcgcgatatgcgccgaccgggccttgataatctacgccggacgcagatagcaaagcgcatcaacgaacggtgtcggaaaacccgtaaatgtacatactgcggagcgatcaatggtgtcgtgaaaaagaccggaacaagtgctctgaagattacccacgacaagttccgtgcattcaacgtctcggtttccgtcaaaaaagaaacgccgatcagcaaggatgtctttgataactctttcctcgaggcgagaggcgcaaacccggaggtcgaaaagcacttcaaaaaggcgcaggatgatatgaacccccttcgcgttcttaagctattcaagaaaatgtccgactctgactgtgagttgattggcatgaatccaaaggaggctcgcccggaaatgttcctatggcaatttatcccagctccaccggtttgcattcggccttcagtaggacaagatggcgcatccacagaagatgacttgaccgccaagctaggtgacattgtgcagagcaatatcaatcttaaaaatgctctactcaagggcgctccagttcaaacaatcatggagtgctgggactacatgcagcttcaaattgctgtctacataaacagcgatgtgcctgggcttaacaaagccgatcttggaaaaccaatccggggcttcgttcaacgcttgaagggaaagcaaggtcgtttccgtggaaacctgtcaggaaaacgtgttgatttctctgggcgaactgtcatttcacccgatccaaatttgcgagtcgatgaggtcgctgttccggagctggtggcaaaggttatgacttatcctgaactagtgaccagatataacaaggaaaaactgcaacgacggatttgcaatggtagcaacaaatggcccggagcgaacttgatcgtcaagaaaggaaccggattcagacagatgttgaagtatagtaatactcagcgaatggctgatcagctgcaagaaggcgatgtggttgagcgtcatctcgaagacggcgacattgtgctgttcaatcgacagccttccctccacaagctcagtattctatctcatttcgccaaaatccgaccccataggactttccgattgaacgagtgtgtctgcaatccttataatgccgatttcgatggagatgagatgaaccttcatgtgccgcagaccgaagaagcccgagcagaagcgatggagctaatgggcgtgaagaacaatttggtcacccctaaaaatggagagcccatcatttctgccattcaggatttcattagtgccgcgtatgtgttgagcagcaaagacaacttctttgatcgtgcctccttcacgcagatctgtctctatatgctcggacctgaaacaagattcgatctcccaccaccatcaattttgaagccccagatgatgtggactggcaaacaagtctttaacattcttatgcgccccaacctatccgaccccgttatggttaacttagacgccgcatgccgtgagttcaagatgcccaaggatggtcgtcccaaggacttggaccccaatgatggctggttagttatccgcaactcggaagttatgtgtggtgtgatggacaagtctacaattggttctggaaagaaagacaatgttttctacattatgctcagagattatggcccaccggcagcagccgagggtatgaaccgtctatctaaactgtccgcccgatggttcaccaacatcggcttttcaattggtatcggagatgtctaccctagtgcaggactcgttcagtcgaaaaacgatcttgttgaggcagcgtactcgcagtgtgacgaagtcattgctaagtacaaggcgggcactctggagaagtatcctggatgcgacgaattgcaaaccatggagaaccagatctccggtattctcagtaaagtccgtcaacaagctggtgacgagtgtattatgcagttgagcaagtacaactcgcccctgatcatggccacttccgggtcgaagggttctagtatcaacgtgtcccaaatggttgctcttgtcggtcaacaaattatcggtggtcaacgtgtccaggacggcttccaggatcgtaccctaccgcatttcccaaagaatgcacgacagcccccgtcgaagggtttcgttcgaaacagtttcttctccgggctggagcctccagagttcattttccacgctatgtccggtcgtgaaggtctggtcgatacagctgtcaagactgccgagactggttacatgtctcgtcgtctgatgaaatccctcgaggatttgtcatcgatgtatgatgacacggtccgtaactcgtctgctgccatcgttcagttccagtatggtgacgataagttggatcccgtggatatggagggtaaagccaaacctgtccacttcgatcgaacatttattcactcagaatccactacgtacaacaacgacgagcgaagcttgttaccgatggaaatgatggaagtctgcgaacagatgctttcgaaggaacgtacgaagctagtccgcaaggacttgctcggcaatgacctggcatatatggatcgcagtgatcatggtatcgatcagttcgaaagtgcccgtgacttccttgactcgattcaggaatacgtgcaaaagagggccgacaaattgatctctcaaggcggcgatatcgacccgtccgatcagcagagccgtaagggcttggatcacacaggcaagctgacagataccacgttgagggctttcatcactgcctgtttgttgaaatacaagagagcccaggtcgagcccggtcacgctgtgggtgccgttggtgcccagtccattggtgagccaggaacgcaaatgaccttgaaaactttccatttcgctggtgtcgccggaatgagtatcacgcagggtgtacctcgtatcaaggaaatcatcaacgcctcaaaggagatcagtactcccgtcgtggcttgcgaattggtcaacaaagaaagcactatcgctgctcgtattgtgaaaggacgcattgaaaagaccttcctccgcgacgtcatccactctatcacggaggtttggtcccccgatgatgcctatttgaaggttgttctgaactggaaaacaatcgaggatctggcgctggagatcacgacgccacagatcgtcgaggcgattaaaaccaacaagcgcttcaagggaggcgatctcaagttctcgtgcaagcaagcctcaatcaaggtccacatggatctcgatccggccagcaaggcatctctttctaagacggagattgccgccacgagcgttgatcccttcctccgcctgaagcatttgaagcgtattcttcctaacatccaaatcctgggtcacccacgtgccacccgagctatcattcgcacggacgagacctcgaccacgaacactttgctcgtggaaggctacggattgagggagtgtatgactacgatgggtgtggacggtctccacaccaggaccaacaacatcatggaggcgcgagaggttctgggtattgaagctgcccgaagcacaatcgtcgtcgaaattagcgaagtcatgaaggacatggacattgatcctcgccacatgcagcttctggccgacgtgatgacctacaagggtgaagtgctcggtatcacgcgtttcggtctggctaagatgcgtgactcagtccttcagcttgcttcgttcgagaagactgccgatcacctcttcgacgccggtggtctcggtcgtaccgatctcatcgagggtgtgtcggaatgtatcatcatgggcaagacagtgtcactgggtacaggtgctatggaagttgtgcgtaagctaaacttctaccaaggccagattggcccacgaaagacggtatttgaagatgcttggaccgaacattgtgaagcgcctttggtaaggcgacccaagaggaaggtccgatgaagtggctgtgaccctgtgactctgtgacactgtgcattaatttcggcgttaagattttggccttttggacaaggcttgtacatgtacttatctgagcggatgaatttcattgacgatatgatcaatagttttcatttgtcctctttgactctacgtgagatgaactattagggctataagaagccgaatgtggagtactcctatatgaccaccccctccacaatgccccaggttcgaacctatcacaatattaaaaaacaaaagtcggggtgtgtacagacgtgaagctaatttccaatacgactgtagaaatatctagggacaagcttcttgggttatattcaaatattcaacctttttacacaaagtacaagaagttcacaacatccctcaacggaatgtctcggattctcaacctatcggtactccatccccaaatacccaaatatccggggatatcacaacgatttccttgtttttttttcaacggctgcagcaatccgaaaagagaacctctaggaatacgagattcgagacccttgggatcggagaaagggtcggggagccgtttatttggaataaaaagaaggcatcaaatcacccaagagagcacccatgtcccgagtgaccagggagtgcatcgtcctccaatcagcatcgtgaaacccctgaggcagccatgggggttaacctttggccatcacatcgcctcgacagttctttgttacccattgccttatccggccacgccacatccgtcagcactcggtgggttgaatgtttctttgtttgctgtgcagtggacggtctctcgaggaattgctttctaactacggcgtacttcgtactgaatatccgtgggtcgcacttaatctttcgcatctcccctcatctatctccccggcctccccgaaaacccccccgcggattcgcacttgggatgaacatggagtttggcaaccaaagaaccgctaggaagcgcgagatccgaacccgagccccgacggcctgtcagacctgtcggctgcggaagactcgatgtgacaataccaggccgacctgtagctactgcgccgtgcaggggatggagtgcaactatcccgaaacatcgccacatcagaaccagtaagataacatgatcgtgtggagaggacaacacactaaacattagccttgttcttagggttggatttgattcggggaacccatcgaacaatgaggtgctccagcgactgaatcatatcgccggtttgctagagaatatcaaatccgaaggctccaccagctcgactcgctcactcaaggaaggattctttgagttggccatgcagaatactagccccatagctgattcattgccggggagcaatccatctagcaccagcaccgctagtatcgatgaccggggagctgataatgatccccgagtcctttacatggctagctccggggagaatatgctccgatggcctattttcaacaaggtcatcaccgaagccgagaaacatatccgatcttttctactcgactcgctggataaccagccccgcagtatgcaggcaccccggcaggtggggattggaagctttgtcgatgagatcccaagactttgcaggaagtactttctactatgccaccgacgaaacccgatagtcgatctggacagtctagaccgttatgccaaggaggtcaccgtccagggtctgggatgggatggcccctcgtgtcaagtggtatgtcaactctcctttggaagtcccacttgaactaagtcatttctgtagctgttagcgtgtgccttggcttcgtgcacgtcatcgaagtttgttcccctagcggatgatatgccagcgaatctcgatgcacttcaagcaccacccatgtcagacgccaatctcgatttggctgagacatatttccacgcggcaaagcagagattcggcttcctgcacacgtccccaacagacatccagtgttttcttcttgctggaagctaccacagacatgccatacgacctctgcaggcttggttctgttatcagcaggcatcttgcagattagaagttcgtttgcggtcgctgtgtagagagcagtggactgctgatgacaattaccataatctggaatcgagactatattggtcttgtatccaagcggaacagtgggtttttcttaccagactcttatatgatcatcaactaagtatcgtcgacagtgagatgcagagcgagctccctctctggagcagtggtcttgaaagcctgggctattcagatccattccctaaattctctcgcagattttcttcctcatatgatgaaatggatgaagaccaagattttgcagtcaagccaggctttgagctggatggcaccgaagaagagaaaggctggaaattctacatcgggtccatctgtaaccgccgaaccactaatgacatagtgtctgacatgtggtgtcaaggagagaagggctggaccaaagatattcccggtcttctaagaaagacaatggacgcggagcgtgtagtaacatcatggtacgaccaagtcttcgaatatggcaatgaaaggacccctactggccttgctaactctttcaaaaggtaccaaatctcggtatccgggatccagtcccaaaaagacaatccagatctgaggttcttcttccgtggccggtaccacatggcattagagaggatctaccgaccagcgttctacctcgcgatgcacttccaggggatgccagcgtttatcaggaagaacaacgcaatgtgggcagaagtgttccatctggcccaaaaagccattgacaactgcgtcaccctaataccaagctactggtatcaattccgccacgagtggatctggaatgtagtgcgcgccagcttcgcctgtgctgtgcacatcctcggggctgtcttatatcagcttgaagcatctcgggatcctagtacgtggcaggtacgtttaccgtcgaattggactgctttggtgaggttgtcgattcgaacgctgaagcattggtcgtcggagtctactgatctagaggtcatggcgtcgacccttgagaggatgtatcagggtacttgtcggttggctaatgtgcgcccggatcttcatctgctttaattgttaatatggaagggatattggatattgggaaagggatatacatatagggctttgtgaacgaactcttgcgtccacataattatgagatactatgcattgatgatttcgattatttaattatgaactgcttctgcttcaatcggtttattagcatgtcaacatacattatgtagttattcaatcctcctagttctgtatacaactggttatactccgacatccgccccaccacaactttttcctcttcacttcatccctttccaccttcaacctctccagctctctccaaccctctcgaaatggaagaatacaaacccccagctctcccctcccccttcaacaataccatcccaccaccaatcctcctcacccaaggcgccgaagcccatctctacaaaactacctccctcgacccctccatccccgccgcgctcaagatccgcccatcaaaaccctaccggcacccaatcctagaccgtcgacttacccgccaacggataatttccgaagcgcgatgcctcgcgaaactcatacgggagggcgtgagcgtcccagcactcctagccctggactgggagggacatggcggccccgaaggcgggtggggcggcgcctggctaatgatggagtggattgacggtcctgtggtgcgggtagttctcgagcagtgggaagcatggatgaagcagaacgagggctcgctggatgagtcacagattgaaaacgaagaggcgcgtgtgcgcggcttgctgaggaaaatgggctcggccatcggtgtcctgcacaaggccggtattgtgcacggagacttgaccacgagtaacctcatgctgcgtccatctgcggacgcaggtgatgcggttgagggcactggagcgccctctttggagggggatgtcgtgctgattgattttggtcttgcgtcgcatagcaatcaggatgaggaccgggcggtggatttgtatgttttggagcgggctattgggagcacgcatccgcgctcggagcctttgttcgaggcgctgattacgggttaccgggatagctacaagggggcttcttccgcgctgaagaagcttgaggatgtgcgcttgagagggcggaagaggagcatgcttggttaagcctctcgtttgattttagggatgggatgcaatctccccccaactgctatgatcgatttagaagcaaaaaagaaacgccacgcttgtcacgacagatatctttattgacgaaagaaaaaagcattcatgaccggtctttgagacacgtgccgacatgagccgacgcgaaataccccttgttctcgactactccgcgatccttgatgactgccgtgtatttaaccacccattgtggctcgacatctccctggatgccgtcgttggcctcgggagaggaagccaagattcccgcaccactcttctcggtgggacccagcagttcccgcgtcgtgccgacaggaagaatatcatggcagtcgttatgggtgaggagttgaatgtgctcttgtttcgcatagagaatcaaatgtttaggaacgacacagcaatccttaagattgatctgatcgaccgatggcttgaccttggtgtgcggcaggaaccgggccaagcgttcgctgccgaactcagcaacgcccagctgggcgatcacgccctgctcgtgcagcgactctagcacgtgccatgtctgcaccatactgtcgaagtcgtccggttcaccgttgctcagctcgctgtcttcttcttcgctgtcgtcgtctgcgtcgaacaggatccccgggaatgagacgatcagtagatcgatagacttgacatgtagctccttcaataccagatcaattgcctctctggtgtgtgcgcaccgccttgataccgggatccccggtaggtagaatagtttcactgtgatatcatattggtcacggtcctctgacaggcctggctgtgagaagtcgatctcggggatatagaggccgtcctcggtttgtagcgcccatgaacgtggatgcgacacggattgaccatttgtgtcggtgccgttggccggtgacgtttcggtttgttgcgaggcgaggaagttcgatcgaagcgagttgattagctcaacgtttgatttctgcgtcagaggctggcgaatgacggattgccgcccagcttgcataatattcctatgagggttgagtgactgtgaccgaggcgcatcgaatgacaccacttacgaactagatagaatcagattcatgatggacgaacgagcgagatcttagatatagaagaagtattggaatctaatcatgagtgaaggaggatgaagatggtccgaaagttgaaagttgcaaattcaccccgcggagagcccctctcctacgggcctgacaaatccaacgttctccaaggttcctctactctacacttcacccatctaatctgcaattacttcaatccttgtcaacagtcggatcccagtccgtgggagaatactctcccgtatcaagcaatttcatatcctcagcctccaactcaaagtcaaagacatcgacattctcgcgaatgcgactcggcgtaacagacttggccagaggcacaaatccctgacaccagaaccattagcatcctgattctacatcatttactctctaggaaatcaatcctacttaccatctgcaaactccaccgaatcaaaacctgcgccggcgtcttcccatacttcttcccgatagacagcaacacaggctccttcaagcgactcccatgcgcaagaggcgagtacgcctcaacaacaatattcctcttcttcaaccactccacgatatccgaatgatccaaccacggatgcagctcatactgaccgacatcgatctggctagccccgctactctggatgtgcgcctccagttcgtcgaggtggtggataccgaagttagatacaccgatagatctcactttgcctgctccttgggcttcgactagtgcatcccaggaacccagacgggcttttttgccgccgtatggagcatggattagaatactgtatatgcaccggttagactgtagattccaattccatggggaatatccgtttctggattgtcgtggaggcttacaggtcaaagtagtcctgtgctgcttcttttaggctcgaatcaatggctcgcttggtagactcgtaccccattgattgcggcgggatcttggtcgtgaagaagacctgcgatcgatccagtttcgaattcagaattgcctttccgcaaggcccctcgttgtggtacatgatcgccgaatcgacctggaatctctttagtacggtcttcttgcgatcttcccggggagcgtacatggcggaatccagctttcagggcttcgagggtaaccttcgcggtctcggatgagggactatcgttggttaggagattcaggaggaagcattggttcaaacgtacatcatatagacctatattcatacaatgtcagctctgcttttgaaactcatctgtgtttgcggggtaactgactccgtatcctaagactgggatcccatgtcccgactgtagttgacgcgttgactggagagtcagctttgccatattgttgttaaattggatattcagaagacacaattcaacgttgtttgaagaggaacgatgaaatcatagagtagtcggtcatatatgccgcctatatctttaatgacgtatgacttcaataaccggattatctgtatctataagggacgattgatgtaagataacactctgatgtctttctaaatgtcatttttgtgattttttctctttacgttataaattctagaacggaggagactctaatagtaagaacaggtttattacatccaatgggctgtgcagcgcctcaccgaggttatatgaggcctacattcctcatacttttagccctaattccgacaatatctccaatcccagtcataagttgtagtgtaaagctctcaactcatattcacaagattacctattctggttagtactatgttggtctacaagcatcatccctgtcataatctgcccgctcttctacctccccccttccttcacgttagcttcccaatttccccgacgtccgacttctgacgtgttgccactgtcttcaatatgccaagcccggaaatagaggaatctgctcaagtcctagaatgtgaaccccagatgaacattcttttctcggctcccgacttcaccgtgccttccccggacaaggtcgatgaaatagtcaaccccgacaacattatctttaactagggcggcgtgaggatagccagaatatcacccgaaattgtcgtcgaattcggaacccatgtcacgttgaccgaggcgaaaaacatgatgtttgtgaaacaaaatacagaaacactaccagtgccggaaatcttcgcttgctacacttatggcccgatagaccgagatatcggagactacggtagcctatttgatacacatcttcatgactttcgtggaaggccagagtctcgataaagtttgggaatcttatgatgagaacacaaaagcccatgttaccaaccagctcaagcaatatatctgcgaacttcgcaatatcgacggcaactacataggctcgactgattccggccccattatggatccgatctttgagacttaccacgacaaaggttagcagcgactacaccaacatatatacgtgtgctaatacacatgtccaggaccctttaactccgaagaagcttttaataacgcaatcgtcgatgcctatcaatccaaggcaccaagatgtcacatcaagagtttcctatccggtatgttatgccaaaacaaacaccagatcaaattcatccacggagacctacgcctccagaataccatagtcaacgatggatctgtcagtgggattgtggattgggaatttagtggcttgtatcctgaatactgggaattttccaaagctctccatgtctagaggtggcaaaatgattggattgactacctagtacagattcttcgaccctattatgctgaatatgcggttcattcttttttgactcaaacattgtggtgatccaaattcttgggcagactacgtacggagtacggagtagcagtatccattcagaccaaaaagaacatttgcacttgctataatgttttgataaaagcaaaaacatgtattaaatgtcatgcatcacatgaacatttctaaaatccaacaacctctctatgtatgcagatacaaatcttcaaaccagccaactagttctttatttgcagctccttctgagcctctgcctccacttgttcttgcaacttacggtccgcctcgcgcttaagctggtcaggacgacgaagagcaatgtccttaggacggaagtcactgaacaggtgcttgagaacgttctcaatcaaccagcagccaccgtagtcgaagatcatcagcacggtcagagtcaccttgaactcattggtgaaggggacaaggcgcagcttctcattcagctcaggaatgaattcggtggcgcacgagaatgcaacacccgaggcggcgatgaggccccagtacatgcccttgttctcgcggattgactcgcggaaaggacggccttggtagttgatcgagaaagtggagatttgctggatcaactgcaaaaggtagatggcactgttcaggagggaaggctcgaactcgccctcgagatcaatattggaatctctcctatcggttgtgttagctatgaggtgggacaaatcagagggaggttcaacgtacggctcgtgcttatagacatagttggagaggtagatcagagtcacgatgtggatggcaaactgtccaagaacagatccaataatgtagacgttgaagatattcggctgcgggcgctccttagacagaccctcgacagacttcacattaaaacattagcaaagcaatttgtgaacgcggagaagtatgacataccttggcgcgggaaatagaaaggaagcagacactcatcagcataccgctgatggtgacctgtccatcaccgaacttaataccctccaagtagatgacactcagactgtacgcactgatcaagcagttcaaagcaagaatcttgtacatctgaatagtcgcaaccagggtgcaacgaccttgacgaaggatattcgggatagcaatgacgttggccaacttgctggtgaagggagcagcgactgatgcatcacccaacttgatagtcggaggttcgctttcatccagctcctgttccatcaaagaagacgtaagcttgtctgcaagtccagctgcggcggcctgagccttctgctgtttctgctgctggggggtcaagttcgatagctgcaaggcctgagcgccaggagatgtgatggttgggatagcctcgggggttccaccagcagcggtgatcgcggcacccttgcgctgcgactcccgctccatggctttctcgtagttagggttggaaggaccagggggatacaggtgagcgatttgaacagggactggaggggcaggctggttgaatctttgcatcatgctgacctgcttctcgtacagctccttcatcttagtggtccgatagtgttcagcgatcttagttaaatcgtctggcgagccgttcagaagcgcgacaccgacgtgagcctgcttcagagcgccaacatcgttggtgccatcaccgcacatcagagtggtgtatccagcgtccttaagaccaagaaggatgtcttccttttgcttaggagacacacgagcataaacccaggtgtgacggagcagaacaggtagagcctgctggcccttgaactttgcgagagcatatccagtgatacagatgtccttagtcttcaggatctccgggtcgaggggcttagtggggtcgacgtcgatattgagcttatcatcaatggtgcgccagacaatcctggttccagagttgtcatgctcgggggcatcaaggatgagaacctcgcgatcaacaatctcaaccttgcgggcgacatggacagcagtcaatgggttatcaccagtgatcataacaacacggtggctgctctcatttagcatacggacagatttaatggcatcatccttcaagggacattgaaggacaaggaaaccggcaaaaattagctcggattcgatctcttcgcgaacgtagttgttcacgcggccctgggaaagttcagattcagatgaaagatacttgtaggcaagagccagcacacgggcaccattgcgggtgaagtgcttgtaggtttcctcgtagttgggaggtgtgttgaccagcatagtgttaatagtctctggggcacccttgacacccacgaatgtggacttgatcttcttggaagtcttgcggtcattggtcgtaatggtcgcgatggtactctggcgtttcagaaccgaggagaactggaatcttctcttgatttgaacagattcaacgttgcgaccggcaacaacgggggtgttgcccttggaagacagagtatcgttgtttcccagagtccagccaagccattccaatgtagccttttccatagggtcaccgacgacctcaccctcatccagcttcaccaatgcgtgagcactggcgagaacgagagtggtgttgggtccagcagcagagggattggccaattcagtctgagcaccatcagcttcaaccttcgaaccagcctcacctaaaccgagtccagcaataccatcaacgacaaggtcctctccagtcagggtaccggtcttgtcaaagcaagcgatgtcaacacgaccagcgaaagggatacggaaaggctcggtgcagaaaatggcatacttgctcaaagcagcaagactagtgtttacggccaagctcaattccataggcaattcgggaggaacaacactagtgatgatgaggacacagtcgagcagaagcttggagcgtttgcggtcctggatcacaccctcttgccacacgtaccacgaagcggcaattgcgaaaatcaggaggaagaggatgaacaacagagcttcaacattgttggcagagacacgttcagttgagtagatcatggttcggacgaggctaccctggctagtttcaaaaccggtcttaacaaccacacccaaagcaccattgtctgggggcatggtaacgttgttggacaagttcttcaagtccgagtcggcagtgagattagggtgagtaacttgaaggaccttggtacctccatgcacaaacgagagcttatccaatccttccggctcaatcaagtcaccgccaggacggagctggacagagtctttcagcagaggtgtgctctcgccagaaagcatagcctcgtttacaatgacactgccttcgaccagaagaatatcacacgcaacaccgctgtcctccttggtgcggttcactgacatgaggtcaccgggaagaagcttatcactagtgatctcttgccatttccgttcacgatacacccagacatcgtaaggcttaatgctcattccacggaactcgctcaaggtcctctggcgctgccacacaaccgtactctcaaacataacgagcatgaaaagcgtgaagagcgagtagtaccaatattcatccaacatccacaatccaacacagaaaatctggaagacgaagaacggcgcgacagcatgctcctggaagagttcaaggaaaccgggaaccgggatatcaaaggtgttatcgccatagtggttgtagacgcggtcaatctcggccttcgacgtgaagccctcgctcagctggaaagtctcgagggcgggctttggttcggcgtcaaggacataagacaagggtgcgaaggtgcgagtctcagggtaaaagagaaagcggcgcttctggaagaggaacgaaagtgtcttcttcgtgccggtgttctcattaatcaatttgcagatctcggcagagccagcgttagtgatgggaaccactttgataagccgggcagtatcgatggacttggctcgaatggtagtgaatagagtgttgatatcaatgttccacttggtcatcaaccaaaagagcgactggattgtgatgatagaccccgcgaacacgaaggtccattcctgtccctgaatgtatgtatcataacgctcgggggagaggtagaaggcgaagaacacgggccagatgattatgaaaggccagacgtatgtgtgtaattgccaagggatcgggttatgcaacgaagcagtatggatctgaggatcgtccacgagctttgccctgtatactgttagctgtagccgcaaagaatcggagggagcttctggtaacgtacatggtggcaatctagtgaccgcggtcagagtctaacaagctgaaaattaaagactcatacgaattccgaaagcaatgatagtatccaatcgaggaaatgcccagatttgttgatgaagccaccttccaccttacaatttttggttccagaggattcgccgctcgacgcgctatcattatgtcagcctgccccgaccgccataggcttatgtagcactttaccgctgctttctacaacagcccggccgggctagctcaatcggtagagcgtaagactcttaatcataaggctgcgggttcgacccccgcgttcggctattcctaaaaccaaacctgagatttctttttttgatcttttcatttgctcgtcgttattagtatgttaatatgtagggagtacaacgtatgaattttttttttgagggagggaatgtggaagatgatgtctgaatatagactttgtgaaaacgtatatgcttgcatcaagacatattaagggatcaacctcaatctaatatagagtacataatgtcccactgtcgttctctgcttcagtgtttagcatgtcgatatatataactcgttttgggcctttctagcttgctccatccgccttcttgtccatcacctcccgattcaactccttcaccattcccgtcaacattctaacctgttctttcagctccctgagttcatatgtacaattatcaagcttgatatccggcatggactccatgacctgctctttccaagtatcatcaagatcaaagttgacatctgtggccacatgctcccattcctgggcatattcatcgtctgcttcgccatggcgtcgattccattgaatctggcgtgcccgactggtctcaacccaggccgcaaagataagcagaggagaatagatcacacccattacaaattcattcagctttgcgtatgcgttccgcgaaagccaccattcgaatggggctattagaaacagaatctcaatgagattgaatgctagtatccagattaagttagccacacgtgtgccatcgaagcggaaaaaatacgtacgcgggatgaagacattttcatctggggcgcggatgaactgcatggttttctgcgcaaagatggccatgtattcgtcagtggcattgcccgagatatcttcatatgcgctgttgtacaaggcaatgagaatattcaacaaaactgataattgtcaacataagcccaaacaagctggacgcaaacttaccagtcatgacaatgaagttgaaaacataatagaggatgatgccaaagggaaatgcaaactcctggaaagtgtcgaactcaggactctgcatgatactgttcaccattccttggagaatgtttcggtgaaggggatagtcgtcatctacttgggccatgccgacgaaggcctggaagaaaccagccatcaccacaaatagaagagcaaagaatatcaagctctccttcatcatgacccggaggaccacaaacatagcaccgaagaagcggaccgagtcaaggtatagcatcatgcgcatccagaacatagggcccgcaaatgccaagaagttgtagctgagctcgttgtatagccgcctttgttcatcgttggcagatgttgagtgtgccaaggcaataaaccgcatggcaagtgacacgatcaggatagtgtagagggttgagttgaaggcattccagaattcgaggtaattccatccaaccttccaaaacttgagcccttcgtcgcagatgaacgcaacagtcataccgtaaagaatgccctcggccacgtccacgtcaccggttgggttcacggtattgatgaccgccgtataaaccgcaaggtaaaccaaggaaaacaaaatttggcagacattctgatacagaggagttcgcatccggtcaggatggaaatgaacccaatagttagtgttagccttctcgctgtattcgacaaagttagttgggttgccctcttcctgacagatccaacccctccacaggtacaggatacatctctggtacggggcagagctgatgattttcaaggcgtggagatctaccgatcgttcaatgacattggcgggatcagtctctactccttcactgaagatggagtaccgcttgagcaagatatccttcagcacgtaatcttggtccggctccgattcgattctgttcaaagtagtgagtaaataccagaaacccaaaaatatcaaagggatattacatgcgcttggcgatgacctcgcaagccactgcccgaacctcgtgaagatcggaatcccagagctcgacggaggcttgaatcttgaaccatcgcagacaaactaaaagacaataaacaacgcatgctttgtattcatctcccccagccttcatggctgtcgcaaccacatcgtccgtgatgatgcggctatttgggtcggtcaagaatttatccttcacttcgcatgagacaacctgctcaatttgatatttcaaccgaagagcaaccttggcaagttcctttgaagcaccagaggcgtgaggctcatcagcagcataggcaggtagcactgtgacttgttagcacattgcggtgccgattgtttagaaatgacgtacgtcgacgacgttccacctggatgcgatgccgcgtcctgccaggatcggcggtaaagagattcctccaatgtcccatatcgcgtagaatatgcaaaaataaatggccacaacaagagtgcaaagactagaaaggggagagttcggctcacggagtttctagcttgaggggccaccaatgatgatcggcggtagataaacttcagctccccgccaagtaatgggcactgggtctgaattcgtaaggaggcgaatgtatctctatatgttggtgaatatgtgtctttacaggtacaggggtacgaattgcatttaaaagcatgactggcattgaacgtctcggttgcatcgcaaacattatgtgcattagaacttgcaccctgttgtgcgaatccagcgtctttgacagacggtgggcacgagggtttcgaccgcaattggcatgcagcgcatgcacaggcgtggataaatcatccccagacccgaagttcaggcgactgcactggctaaagggcgagttctgactgtaatcctgcccattagcacattgagccatcgagcctttctccgatatgtgcaagcttttttctatccattttcgccaaactcccctctagcggcgatctccgctttgtattccagcgcatgaccgccgtatgcccctcgactcggagttatgacccataacttactcaggaacaccctcatcactttcagagtcttcatctccgctgacctgggtgttctcacgctcacgcttctccataagctcctgcaggatcgcatcgtcgtgctcagtgacagccttgggtgccatcttcacggtgcagctaccgccgttcgccttgatacgctcttcgattttcacaatagccgcctcgagcaacttaacgccgagggtcttgtcgagacattggctggccaggacgtagagaggaggagccaccagtctgaccttgatctggttctcgggggtgttgtcggcctcagcggtacggagggcatccttgacggcatcgattccatcgtagccgaagcaggtaacctcgatatcggcacggaccttggtaggatggggggtcagcttgctgctgatgtattgctgcagctcgctcttgacggcatcgctagggaaggtgatctcatcccagacgttggggttcctgaaaacaattgtcagaatttgatcatatcacgagacaaaaagcacgaaaacctacgtaatggagatcttgaaagcatcgtgcgcatgtccgtatttctggttcaaaggccacccgatgttctcgtatagggtctcgaggggggtctgggtcgcctcagcaacgtggcgcatgatagagtgcactgccttgctcttgttgtaacgttcctcgcacttgataacatcctcgggggagacacgtcgcttcgacagatcaatgtaacctttaagttgacaagttagttctcaggttcttcgaggcaaataatgtatccttgcctttctccttgtcgacacgaagcacgatgacgacctcgttgcgcccaatgcggatgagcttttggatactgcgaatacgtctgcgggagagttctgagaggaggatcatgccatcgatgttgtcgtattcaagcagcttcacgtatgcgcccatctcggcgatctagctcgttcacacaaatagtcagtccctgtcgctttgatctcttaggccattattcagtttattcatacctgcttgacattcaccatgacaaagctgtccacctccgggtacttgtcctcatagaaccgacaatttgttaaagacatcttggcggggttctgtttttttttcctcggggaaatcttaggtgcgaacaagacggatttgacggcacaatcgagagatcgatctagtggccaacagtatatgcgtgatcgtgaagtcggagatacaggagcgcagaagagagaggtaacgcgaatgaggcacaatctatctctttgtggcggacttcaaaacccacattgacctgatcggtcacgggactaaaaggcacgtggttatgtaattatctcaccgccttctgcacttggaagatttggtcctccgtatggtgctatgctcggtttatatcgtaaattgggtaactatttggctattgaaaagaaaaagcatcagcccaacaccagcctagcgatccttgtgcgcaatgctcatgctggttttctggttgctgtctagcttgcttataatttcccgcttcttttcttcatcaatctttttgggacgcttcttggtcttcatcttcccctgcccttggtgtggaactagtgactgagttgtttgaaggcttccttttggttcatcttgctgaacttgttcatataccgcagttggacgtcgggcttgtattcgcggttcaacacgccggctatataacgtactccctgctggtcacagcttactcctcacttcatcttctctgtcgattttcaaaatgatagtatcaatttgttcgattgcacggtttatgatagagtttacacggagtttttctcttccccgtggtgctttcggcttcgcttgcatgaatgcaagtgacaccactggtgaggtggcagttcgtgtataaactaaccagcccagccagttccagtggtgaatggtatcatcctcattgcaaattgcagcgcggtacttgaattcatcaagctctggtaggggactggctagctgtaaagtttgaactggctccgaggtctaggtggaatttgggacgctgacatgcgatgtgataaggtagaaaggtggtaccacatttaataatatataaatatacctgcagaagcataggcgtcaaattgttataagagaaacccgtatacagttcgtcacaagttatatagagtgaatatatcacctgaccatatctcttggctgacacatcagtcaattgcgtcaacggaaatcaagggcaagatgggcacattcggcactcgatgtccggcactcgatggcatccgacatttctacgaatcagggagtttcttttgattatgctgaccatgccttttcccttcattgcacagtcattctccgaggatctgcgttgaattaacgataacagtcctcgggttgctttccccgcttatcggttccttagcgccgttggcccttgccttaccgacacaaacagttcgggctggtcccaatttcgaattgccttagtctttgatctctatgaccagcatttatggcgggctgtttcgtgcttaactcttaaagataaaacacctctttccagatcatgtctgagacaggttcattactccctggggagtctgacggactcggacgtccgactctacgagaccgcattgtcgacgctttccgttcgtcacctccaaccggtcttgggatctcgacaaattcaagccatgataataacacggcacatgatagccaaactggtaccggggctccgagcgaaccagacgtgagaactcgacttctcgaatcatacctccagcccgatcctgtgtgcggcgaaaggcgctgcagccatggcacgttctcgccgcggatagaagatacaggaagagactcatacatcggggggccgggcgcatttggatataacggacatgaattggcggacggcgcggccggtcgccctagaggtatagtagatcacgagtcggtctcagattcagagactccacagttgaaatcatcgttcacttttccaataaacgagacgaataaacagtaggtcgtatcttactcttatactgcgagcactttcgtagcctgcctcaagattggtaactgacgaatcgatgacagatacatatcctattatattccttttttcaattggattggacaatatcattggtcattcctgcgcggagatctcatggctgcgttgaccgtggcatccatctacatcccgatggccctctctttggcctccaatcttgcacacgcaccacccatcagcggcctctactctttcgtgatccaccccttgatttatgccatcttgggaagctgccctctcttggtagttgggccggaggccgcaggttccttgctaacgggtgctattgtcaaagcaagtgtcatgcaaggaagctcgggcgaggacgaccctacagaaatcgctcttgttgtaggagtggccactgccttgtccggcgccatgatactcattgccggactgacccgcctaggattcttggacaatgtgctcagtcgaccattcttgaggggtttcatcactgccatcggctttgtgatttttgtggaccagcttatcccagaattgggtctggccgagcttgccaaagaaacccgtgttagccatggcactagtgttgaaaaactgattttcatctttcgatacgctcgagagtgccatggactaactgccatcgtttcgatcgtcagcttttctgtcatcatggtgttcaggtgcgtaccgtatccccgggtttatattcaccatactgatcctccgcagaactttgaaaaagatgcttgtgcctcgtattccccaagtgatttatttcccagaccgcttcctggttgttgccctgtcagcagttctggcttggcacctcgactgggaatctaaagggctcgaaattcttggacctacagaagtcggctctggaggactattcgctttcacttggcctttccagcttgcatatatgaagcatgtgcgcacagcattgagcaaatcctttattatcgcgctccttggcttctttgagtcatctgttgcggccaagggcctgggcggaggcagttctgatggtatcaagggaatgcacataagtgccaatcgtgagatggttgcactaggcgctgccaatgtcatcggaggctgtttctcggctttgcctgcttttggcggatacgggcgaagcaagcttagctcgcagacaggagcacggtcacctatgactagtgtttttctcagtatcatcacattcacatgtgtcatggtgcttttgccttatctctactacctcccggttcgtccctctcaaatatataccacacgtgtgcttttccaagtgctgaccacatgattttccaatagaaagcagtcctgtgctccatgatctccgtggtagccttcactcttgtggaagaatgcccgcatgacctaatcttcttcttccgcctgcggggctggtcagagcttgttctcatgttcctcatcttcacaacaacaatattctactccttagaactaggtatggcgatgggaatgggcctgtcagtgctaatcctcattcgacatgcaaccgccccccgcatccagatcctgggcaaggtcctcggcggcacaaccgcgcgtttcgacaacgccgagctccacccggaaaacgtggagctaatcgaaggcgccttgatcgtcaagatccccgagcccctgacctttgccaacacaggtgatctcaagaaccgtttgcgacgtctagaactctacggctctactcatgctcacccttccctgccgcgcatgcgtgctccggaacacaataaaaatatcattttcgatgttcatggcgttacgagtatcgacgggtccggtacacaggttctttcggaaatcgtacaagcgtacacagagcaacgcgtcagggtattcttctcccgtttgcccaataggagtgtgttccgcatgtttgagctgagtgggattgttgagacatgtggtggattgagtcatttcgtccctagtgttgatgaggcgctgcggttggcggaatctgagaaccagacacaggagatatagtgtgtctaccttgctggaattggtgacatgtgtttgggtacagtttggatatattgtacagacatattgctctcgatcatctaaaatataattaaactgttatactacttgacattttgtcaaggtgcaagttcaacacctatccatgagcaattacttattttccaataacgagccttgcttttcttgggtttaatgggaattgaaataaacccttcatgctttggtatgcaccatgatcaggagacctgatcgtgccattctggcgatgaaagcctcaattgcagcatccgcagtacgtatcagggtgatgaaccactaggtcaaaacatgactagcagctgcaatttagccgccccggtttgcacttagttgcaagtggtgtattggcgatgagtccagcggattgaattgaatagcttcaagaacaaagctattagcaccgtgaatccaggcagggcatactggtcggttcgcactcgcttcttccgagctcgaaagatattataacatgtcccagtttcacactggcacagaaaaacacccagaggctcacgtagccgaatgatcctccacaacagccttccggatcacctcgagcagaagcgcttccgccgcccccgaaacaagttcattactgtcgccttgaactcgagcgccctcatctccatccccatcctcatccccggcatccctatcagcagccacaaccagtttcacacgtccttcgccacccaaaacgaaagcagcacatgcaaccttcgatagtcgcacatgctgcttagcaacctggtccgaagacgacccatccagatccagcttcatggcaagatgcgtctccaggtacgaagtaagattggcgatgagaggactgcgcagtttatgctgaaggcgtgattccggcgccgactgtccagactgatcgcgcaggaagtccgctagtgaagcgcgcgtgatgctgacattgagggatctcagcgccggtgcgatagacggtgaaaaggagagcgtgagctgtaactctttgataatatcttcgactgtgtcgcttgtacttgtccgttgagtgcgcagggtgtcaacgtatgtctccagacccgcgcagataaagctcgacggcagtcggagtggcgagcagtaggtatcgaaattggtagataggaaggtgaggaatgtttgccggagcgcagttgggaatcgggttaggaggagagggagagatgtggatccggtgcgctgcgttggtggtgattttgtgtctgcgagcaaagctgctttgtagatgatgttttcatattctagtgttactagaattccaggaaatgtgatactctgtgatctgcttggcgcttcgtcgcgcgatggttgagaagagattggccgccatagacaattttttagggcgcctgttttagaaaacgcgtcgtcgtctgctgcaccagtgcttgtatgaataccagcgaggacatcgcctgtgagatggtctcgtagacgcgttgcatatgtttctaacgcgacctggttgtctaggagggctttatagtccttcccatgatggagaggggagagccggtggatggtccaagaagtgttgaacaactgtcgtttgtctgcttgttccatggcagccaacgcacgggtttgcaataaactcggctaattattatgctacaattgaagcatatcgtcgtcgaggaagattgatatttggatgtacagtgacgcgtgccggtgcaaacaaagcaaacatctatcaatttcctaactaccagtacgtcttttggcttcagaagagagaaataaaagagtgaaatggaatgcaaatgcaattagctgaaatgttcatctatccaactccaatatatgtccggtataaaaattaagaccccaggcgcctccaacactcaaattcaatgtatcatgcctgccatcctctcgtgggatgacaatccggacacccaaaaacaattggaataccattccagatccagacgtgctctacgttatggggtatcgctttccgggctttcaactcagcctcagcggctgcaaaccagatatcttgcactgaactatgcaggttctgcgcagacacgcgcgcaaaaacaaccgagtccataggatccttttcatacatcgtcgtgtcctgatagaagttgtacataaactctttgcgttgcgctcgctggctcccaccgtccccgatctcagcggagaaaaactcaacgatccgcacaaacggcgccaatgtgagcaacgagctaatccacgagtcatcaatgtcatgtccgtccaaagacatagcgtagcgtatatatgaaacaagcagatgcatgcaatggtgtgttgcaaccaacgccgccgtattggtgaagggagggctttggaggatccgggtttgtagctcgcggtacatcctctggcgtacctcgagcggtaatggtacagggagctggcctgcctcgtatttttgtacgagcatgttcgtgtgctcgcgccgggcggatgcatatgattcgaaaaaatagagtgtatagtacctggtagagaagaggtcagtgacttgctggggtgaagcaattctgcgctgtccttacatgagtggtgcaaggtggaaccatatgctagctatgccgcgttttacaagggcgttgcgctcgtttcgctttgcaggaaatgaggccttcatgacggccggttcagtctggatgaatcgatcgaggatccggtctgccaggtagtagcagagccttgagcagagcatttgccgtcgccgcagcccatgcaagtatttgaaggtataaagatggccgcccctggcgcttttggatggtgggaatagatccgataacagcacgacatcgtcaccggggtttcgagtatagattcgatcattgtcgatcggggatggaagggtaccgtggcgacgcaatcggagatactgccggacaatctcatgctcgttgctggtgagcagttggcaaaaagccttgcatacgagtctcagcggatggaagtctgtgatgccggagtatgcgaatatgcggatttgaatctcgacggggaggtcccatggcgagggtagtggaggatctgtaggatcctttctaacagcgaggtgagtcagtgaaattcgcggcttgtcgcaaaagatctcaccttaaagttgatccacgatggtccttggcacccacctttctcctgttgtggatcgcagcccgtactttctgaacggagagggcgaatttggcaaagccactcattcttgggccctgcagcacatgaattgactggctcccaacgagaagcgcactttaccggggctcatggagataaaacaggttcattgaagggggcaatcttaggctaggttccataaatagcacatgactaagcccctcgatggtccaccctcgagggctgggcactccgtccgatcaaatgtattgaaagacaactacggagtgattgtagcatccaagggcaaattaaatgctgttatttctagtagaacatgataagcttggctctgtcgaatacgagcaactagaccaaggtagtcaaacaaacatgcaaggagcaagatgaatgaatcatggttccacttagatgcaggcaatggtctgatatgaacatgacatagacagtagtcaagcttgatatatagactatgcaagctgcgtcgtacagaacaaactgcccagatggttcgatggaatccttacgagtttatataggcctgggcatacgtcattgcgtcaatggcgtgcccaacatatatataaagacctccctaaccccataccttaagcatatcactccaactcacaaaatggtcgacaacatcctcattctaggtgccactcggggactaggtgcctctctgcggacactgtactccgcaaagccaggaacccatgtgtttgcaacctctcgatcttccaacccagagccaagctcaggtgtcacctggctgaccggaattgatatctcccagccagatgtggggcaaaagcttgtttcgcagcttccatctacaaagctatcgacagtcatcattagcgctggttactttggctttgaaacattcgattctccagactgggagaaggaggttcagatgtatacgacttctgccattggtcccgtctttgtggtacacaatcttgtcaaagccggattgttggaccagggcagtaaagtcattctcgtcagcagcgagagtggcagcatcacattgcgccacgagaaagaaggcgggggtaactttggccaccatgctagtaaggctgctttgaatatggtcggcaagctcctaagtttggacttgaagccaaagggaattgcagttggtctggtacatcctggattcatgcggacggagatgacgaagagcgttggatttgataagtactgggatgcaggtggaggtgagtgaccattttacaggccttatgacaaggcttcgggaacttgttaggtctaatgtctgacctatatctcttggaaaacagccgtgacaccagatcaagcagcgaaaacgcttgcatctttcatcgaagattttgatcttagcaagaccggagaatactgggcgccagcaggaccagggtaagaaatttgattgtctattatataaacccaggctaatctatcatgtcagagatatcggcaccgcagaagttgttcttgggaagaacctgccgactcctttgcaacttccgtggtagagagtgaaatgatgaatatgagctaccagagccacgagtctacttcttgctcaaacccaagtacctatactaggcaccaaatttagagtaggcatttcaatccgatacccccggtctcgcacacataaacaccaaatccctccccatgtcctttcgttcttcatgcccaatgactttcacaccaagaatattcgcgtagaaagcctgcgtgcgctcatcatccgtcatcaacataatccgacgtagataaggcatgttttccttggaaaatgtttccgcaacacaaccgataagccatttcccaagtccttggccttggtactcagggagaacgtaagtatccgacagataagcaaatgtacaaccatctgtgatggtatgagaaagcccaatctgctcagtgttctccggagatggggtggtagcatcattcacaggttgggtccacctgtacacgccgaagcacaaggagccgtagagcatctgccacagcaccttctctgggatgggctcgttgacccagtaaatgaagtctctgttgagtgcggcattgactgctttgacagagagtaactttggatcggttgagatgaagaattcgcggttggtatctcgtgtccatgtcttaggtgggagtacacttgttggcggggtagaggacatggtgaatgtggggtgctgtatgctgggtgcgtgctggattgtcttcgagaaatgcaaatttatatgcagttggacttcaagaaatggatggtatcttgagatgagttcgttgtatggttataggcgaagagattgtagtctgtctggttatcgtgagtcatgcgctaaaactgcacttggcattacctcaatcaatactctgtacatgagtctgacaagaacgactatatcgcgacctgccgacaaatccaaaaatgaaaagctggccgatagctcttcatttgtagttgatatcggtggaaaactggggttgatattcctcttaagtatccggagatcgctgctgtatcactgtaggatcttccgagattgctcaggtgaagctgattgccaatgcgcaagttgataagagcaagttgataaaaagatgacggctatgttcgtgatgtgtaagaacagcgccggtgtagtcactcgagagactcgggtatgttttacacctggggagtcatccatactttaggcacgtggttcttcacgactgcctaataaggctaagcaacctgataaacaccaaaacgcaatggtcaagggctactccgagctttaatttatatagttccgccaatagaagcatagttgggctgcaatggagatgatgtcgctgttcacacgaatttgtcatttactgtagttgtgacagtgctgtatccttgctgtagtagataatgatctgtactacggagtactccgtgcaatcctttgatatgcaaccttggaaacatccacgatattaattcgtctcttccagaacttcaccgtttaaataccttggcattcaactcgaatcggccgagacaaatggcgacatttcaatttccaacctcgataccccaacttgtactccaaccatggcactccgcaatggcgtggggagtggagaggatggtgttcacgatagcccccctcggcacgccatctggaaccgcgatggtgttagcgacatcaaatcagtcccgagaacatcacaattatagccgcataaccgactgcaatcgtcccatatgaagccaattatcagattcgatgcgctggattgcaattcgcattatgtggcgtgtaaaacgttgcgcatgacgtgcaggtgggggtgaatctacaagaatgccgggatatccaactatgcgacagcggttacatgtttgtgctgtgattgttttactccagagaaaagataaacggataagcccatcatgactctcgtacaagtgcccgtggctctttcctcaaatatcgaacctgtctcggaatcgatcaagggtccttcagaccgcaatggatcgaccactgtaacggtgaatagtgatatcaccggattatcagagaagcttgagaagatccgatttgaactggaggagcacccggttgatgtggtgcgacccatcaaggtcggtattatcggcgcgggtctggcaggaattaccgcgggcatattgctccctgcgaagctaccgggactggatcttcgaatctatgataagaatgccgatgtggtatgttaatgtccattgatgagttgttcgacgttaacattctttagggaggcacttggtttgagaatacatatcccggtgttcgctgcgatatccctgcacatgtataccaatccagcatctcgccaaatacccaatggacggaagaattcgctcagggagatgagatcagacaatactggcagggtgttgcacggaagcacaatgtgtaccagtaccttcgcgcgggacaaaaagtgcagaaggccgaatggctgccggagaaagggaaatggaaggtcactgttgagcatgtagatggctccaaggtaagaaatagttattgttaatctgaacgttctatgcttacatccatgcacagatctatgaggaagagctggacgtgttaatcaacgccatcggtcatttcaatgcctggaagctacccgactatgaagggatcaacaattacaagggaaagctcttccattcctcaaactgggatccaactaccgacctgaagggcaagcgaattgctcttatcggaaatggcgcttccggcttgcaggttctaccctctattcaaccatttgccaaccacgttgatcactacgctcggaatccaacttggatcgcagattcattcagcagcggaaacgttggaatccgtcgactggagccaaattcgttctccgaaacacagctagagacatggaaagatcccaaggcgtatcttgaataccgcagggataccgagaagggatatttccagcgctttggagcaatcttcaaagacacacctgagaacaacgaactgcgcgagaaatggaccgccctgatgctgaagcgtatcgcaaacaagcccgaattggcagataagatcatccccgacttccccccggcgtgtcgtcgcccaacaccaggccccggatatctagaggccctatcccaagacaacgtcgactacatccagacacgcatcaaacgattcaccgagaagggcattgtgaccgaagacggggtggagcgcgaagtggacatcacgatctgcgcaacaggggccaacgtcgaccacgcacccccgttctccatcatcgccgacggagtcgacctaaagacagcctggaaacacgatggcaaattcggattcccttactcatacctcggcttcgcaacacccgggttcccgaacctcctctggctcggcgggccatacgcctctggacacagcggcacagtgcccaacaccatcgagaaccaagtgacatacatcgcgaaggtgctgcgcaagatccgctcgcagggaatcaagaccatcgtcccgtccgcccaggcgaccgatgacttcgtcgagtactgcgaccggttctacccgcgcactgtctggtcggcgaactgtagctcgtggtacaacggtggcaagcccgggtctcgtatccacggtctcttccccggtagtgcgtcgcattcgaattatattcgtcgggatccgcgctgggaggattgggagtatacctatgttaacccgagtgggaatcggtttgcttactttggtaatggctggactacgaaagagttggctcctgatgcggagctaacgcctcatctgagattgcctgaggagattgatttgaaatctcacatggagggatggtgggatgtttgatttggtatggagttcgttagactggatcattccaatgcaagagtgttagtgtctatttggatatacctatacatgaattagcgctgggcaatactattttttttcccctatttgttgagactgttctgataggacctgctccctgccttgtttagtcttcttctcaacacagtactacccgtggtttcctttatcatcactatttatgctcagtatagatttgatatgaagatgaagccatatgatattctattaacaagggctagcaacaattttttatttgttctaatgcagatattctacttagattcctccaatgaataaggaggcacctcctggcccgctttccagaagtatttcgcacccgggtgcgcatcagggagtctggactgacccttctttccgtacatgttctcacggaaagttccacccttgacagcgtagtccgaccagaatagaccacggcgctgcaactccggcagaagtagacgaataacatcgtcaaaggtatcagggagactagcatagctgaagttgaaaccgtcaacatcacccacagtcacccatcgctccagctcatcagccaccgtcttcacactgccaatgatcttgacaccattaccaccgagcaccaagtactcagcaatagtcttcttatcccacttctggccctcagtgccaggcaccgtactagcccagtggttcaccatactgcgaacagcaggaagctccacgaaacggaagtcctggtcatcagagtaggtagacagatcgtaaccagtccagccaccgaagagagcaagcgcgccctcccgatcaccgtatgtcttcagctcctcgaacttagcatacgcctcctcgtcggtctcagcaacaatcaccaaggcaccggcaataaccttgatatcctgcgggttgcgtccgagctcggcggcctgctggcggatactatcaacggaaggacgaaccagctccggcttctgcgcatgcaagaacacagcctcggcatgtttggcggcaaacgccttacccgcggtcgacgtaccagcctgcaagataaacggcgtgcgctggggactgggctcacagagatgagggccgggaacctggaagtactttcccttgtgattgatctcacggacagccttggggtccgcgtaggcctgggtcttgctctgggtgccctgcttccaggtcacggcgtcgtctcgccaggacgcctcccacagcttgtaggtgacgtctaggtactcgtctgcgatgcggtagcgctcgtcgtgctcgacctgtgtgtccaggccgaaattgcgagccgcggagtcgaggtacgaggtgacgatgttccagccgatgcggccgttgctgaggtggtcgactgtggagaagcgtcttgccagcgcgtagggggagtcgtatgttgttgaggctgttacgccgaagctgattgattctgtggctgcggccatggcgggcacgctgtagagggggtcgttgatggggaattgggcggcggcggggattgtcggagtgaggttggaggggcctcggtatacatcgtagcctccgaggacgtctgcgaagaagatggcgtggaatttggcatcttcgagcttcttggctagggcaatccagtgcttaatgttcttgtagtccgcgccttggtctgcggggtgacggaatagacctgggttgagatgactcggcgagtgcatcgcaaaggcattgatgatgagttgcttcttttcggaagacatggtgatggtgagggtggtgtttgacttgggatgattgaattgagttgaattgaattgaattgaattaattgagtctacaacagctctagaggggtagattatatttattgtccctgcacgtgttccgtatctgccaaccccgcggtgcattgtcgtgagacgtgcaaaaagacgtgcagttggaggccgatggcgtcagcatgtaaatgtggggtgatacgtaaattgctaaaagggttgggattccaaggttctcatggattggattggatcggatttgatattgaaattcgtaacatgtgttgtgctctctacgtttatcttctctcgaccgagtgaagtatggcgcgatgttatcccaatcaggaatgagggatttctcttcctttcatttctatacttgctccctttttaggtgggactatattcatacttggcattgatcatggtgaaatggtcaattgtattcaccctcccaatcgttgttctacattgaacttgatgctcaattgagcagtggtataactatattcggggttggtttaacctagtcgttacccgatttggtcgattttcgatccatactacttcttatatagaatacaagccccaagacaagaaaaagtacgtatccattgttattcagtctatctatatttaaaaaaatatacaaaaggataattgtaacatcttctaaccgtcatactaaaagcaaaaaaaaacaaaaaatgagtgcatcatccgtgaatcgaacacgggcctcgtcgatggcaacgacgaattctaccactagaccaatgatgctagttcatataagagggcttactatttcatatcaagtagtttatgacggtgctgcttgttaagcgagccctagacactgcctcactgagtcttggggccaagccaagcacatggggccaaagatctcttgacccgagcttccgatgtctcgtattcgctctcgctttcgggagggttccaaggttctgacagctcgtgtggtggggaatataaagttcacggcatggctgtgggatccgccttgcgccctggaccattaacccgtagtctcaatatcgacatacctgtaattgccatagttgctatctgcgaaaggcaaagggggcatcgtggctttttctaatcctggggtgtcatgtcggccacagcggatctagagctaccaaactgtcaacaaagattagtgcatgtaaatagcaagggcgaaatatatttttgggtattataccaagcccggcatgtctgcgattgttgaacgctcccatgaggtggaagcagcttcattgacggtatgagctgagtgttgaatgacctttccatcccttcgatattccattgggtccaggattcaaatattctgggatgaaactctgcagaggcctagtctaccatataaatcctaccatctggttgccagataatattcctggtgcaatatgcaatgccaaagcactaggtctttccctcgcctggaaacaatctgctgttaaaccatcgtcaaagctcaattgagtcttccgtctcaggctagagaatccctaagatagccccccgccaaggtttcccggatgatttgcagtgagtgtgctcaagtaatcgagcacttgcgctacttttgctatcagatgagaatcattaaaagggcctttcacatggcccttaacgtatcccataacgatatatagccacgcccgatcggtagagaaacgatggatacgcgggacgcgggatagtatgatcattgagttcgtaggtttttgataatcagcctcgtcttcactgagccttgtccaaatttgataacgatatcattcgaaatccaataagattccctgcttggcgcccgcggacaattcgatcaagagccttattgatccacagtccgaaaaggtagttgagtccatttctcccaaaaaagggtgatcgtatgaagttcaaagcggcagagtttctgactgtgactcgggcggtcggttttagctacacgaggaggttcgagcactatgacgacgcccagacatgcccagacatgcccgatcagaatgtgcaatgtcggcgatgcgacgcaggattcgaggaatgggaatggaagattaccttacatttactgctacaatatatggcttccaacctttgaagctatagccattgccaccttgataccctacaatatggatatcaactagttcgcgccgcaaacagccatgacgatcctagctctcattcggccccctcatgaccagcgcccgacaagactcagccatggcaagagggaggcttagaaccgcttatccaatcatatccagtcctgtgggcattgcccaagtgaagacatggtctcactgcggggaagcgcagggaggttgtgttgtttaccttttgactttcgaacatttaaaaccttacgacttccccccttcttcatcccttctaaatcaaatctctacctttgaacatccaaatccaaaggtccacaacactgccataatatttgaaccatgtctgcaaacggcgcaaacaccggcaaggctcccgcccccaatcatggtcatggagcacatcaacctctggtcaatgttcagccatttcatatgagcgatctgcagcccaaatacgcgcatcaaatcgatcatgaggatgataaccccgatgcgcatggctggtatgccggtttgagtgagttacaccaatactgtatgcgctgcgactctcttcctaaccatgtattcctcgtttagtccacggcctgggtgaatgtatcggattctttggagctattccctgctgcatctgctgcccgaaccccttcaagtcagtcgaccagggtgcggtcggtttgatctcgcgattcggacggtaagtgatcccctctccgccatgcctccgaatatcacttactgacaatgattaattctagcttcgaacgatcggtcgatcctggtctggtcaagatcaacccgcttagcgaacatatcaccacggtcgatgtcaaaattcaaatcgtcgaggtgccgcgccaagtctgcatgaccaaggacaacgtgaccctcaacctgacctccgtcatctactaccaagtagtctctccccacaagaccgcgttcggtatctcgaacgtgcgacaggccctgatcgagcgcacccagaccacactacgccacgtgatcggcgcgcgtgtgttgcaagacgtgatcgagcgtcgcgaggagatcgctcagtcgacttcggagatcatcgaggaggtcgcagccgggtggggagtgaaggtcgagtcgatgctgatcaaggacataatcttcagcaacgacctgcaagactctctctcgatggcggctcagtcgaagcgtatcggtgagagcaaggtcattgctgcgcgcgccgaggtcgaatccgccaagttgatgcgccaggctgccgacatcctgtcctccgctccggctatgcagatccgctacctcgaggcgatgcaggccatggctaagaccgccaatagcaaggttatattccttcctggccctggccagcccgggcagacgcagcttagcactgccgagaactttggcgaaggtcctagcaagtacggcactatctcccaggacgataatggactccagcatgcagtgaacgctcgcgttgtcgaggacatctagatgcgatcttgatgcgttttcctgcgtcgtctcgttctccttttatttaattggtcagtctcttgcgtgaaggcatgacccttttaccctttccggaaggtggatcatttgaagctgttcctcgacagctcattcgtctatgctccctggattttcttatttctgtattatggctggacgtgactggatccatgacgatacccaccttcgtttgcgctactatcgcagctgctttaatgtctctttaatgcccctatgactgctttatcataattatttcgtctaatgcaatgcagcaatgcaattcttgctatatgtttctttctttcaatcgcacctaatataccaggaccagtcagtcggcagcgataaggcacgtataaaaacgcgtctcacatgatagtagatgcgccacctttgaatcatttaaaataactgccggtagaaaggctgaaagggtttaaatcactgaaatccacttatgaaccttgatattctcgattatgtacatattccgcacccctaactcgatcagatgttttgcgcagatggcgttcccgatgaggctcagttacagccaagacatggcatcttccagagttgctattattgcaacagtctgattcctagaacagcggtgaggggatctataggatttgttcggatgtagtttgatttggtttgtgtatgatattgacttcttactcccaactaccctctaccttccaatctcattcgatcaactatatacttaggtagtaccccgaacactaagaaccctggactctccccagagtctgatcctatcccgatcccgatcctcaaaataatctactactggttcatcttagcccggatataaaatccagagccgctccttgccaagtgtggatagtccatagtcccgaggcttagcggaggattgcggattttctggaataggtatgaatgccggtagacaagcgatgaggcgcttctatatgtaccaggaaaacacgcggggcgatagccgaaattaacactggttgaagtggacgggataatttactcggaatatgattaaccaccgacttccgcataagcagttaattaagatcatgactgatatcacggcttgttcaattcctatgtaagatgttaggtgagtactgcatataaccaggaaagaaccaagctccagaaatgtacaacataaagtgtacaattcactgaagacttttatatgaaggatcctcgctagttagttacacttgtaagaatgtggtattatataacacgaggaatagagtttttttccaggcgagtgaggctccactaggagcgttgtaaccgacagcatgggacgcctaaatttacgtatcagacaatctatgatcctagacagcacattcgattattattgccgacagtattaccccctgacagaaggctttttcgtctccgtaccaataaggacccgagtgttatgcaagataatgtgccgaggcatacttactgttgagtccttggatggactgttcgccaaatggagtagtttattttcgcgtaatttaaatctaattaaatggggttagcgctagataaagggctagaataagccctggatgatcccggtatataacatagggatcagaacacgctgtagagtaagcactgtgaagttactcttgcggtataggatgcagtatactgaagggattcctaacatataccctgtactaagacttgcaattgaaagtcgagaattgaagttgaaccctagtttttttctaaaattaaatgaaatttatcggtaagaataccagattaataccacgctaactatgcactaaaatatatgatgggcgaatcccaagatagactgttgtagattgggtagagaaacgtgctgtaaaggcgctaagcatgtgagtggacattgccgatacagacttgggaattttccgtgggtgatattttctagtttacttctttattgacaaatgtaaatgttctatgttcaagtgattcactgactcaatttccgaaagaaatagaaaataagtccaaagtttggccaggtttgaggcagggtgacgggaaactaaccctggaggctgagggaggatatagagtcagcactaggatatatcgagaggagctaagatcaattcggatatggcactgcaggtataaataaccaaaataaaccccctttcgatccattcggaggctgataattttcgttttcccgctatacattctactctttcgcaacactctgtagagctacctagcagatacaacttccaaatgacgtctactataccaggattagttgcaagggcaacagcagattcagatctcacgacgacggccatgtcaagtatcttcactgcccccgcctcatgctcggagtcgtggacattcgaaccagaggttgcaaacagtgtccaaaatggtctcctactgcaaaatgccgcggcgagcgacaatgctgatccggcgtgtttcccttctggatacaatcattatggaagagttcaagcatctcttgtctatagcccaggctattgtccaggtggatacacctcagccgagttagcggctcaaagttcgacaaccgctgccatctgctgtccctcgtaagtgaaaaacagcagatcctggttcccggcttaaatattaacttcgaggctctagtgccttctcctactacgaggaagcaagaggcgactctgagacattcgccggatgcctaagtcgtcttcctagtggatcaagtaccagtgtcaccgtccgccagaactcgacgagcacagaagtcagcggccccatcacgatgtgggcacaagcaatccaaatcgagctgcaagcttcggacctaagcctatttgtctccgccactacgacacccaccactacaacaacatcatccgacacctcatcagttccgaccagcagcgcaaccgcttcatcaacaccgaccagctcaacagccccaagcacggggtctagcggcatgtcgacaggagcaaagattggtgttggcgtcggtgtcggcgcaggaggtctcattatacttgtcgctctggtattctggctcttccgccggcgtcagaacaaccaaaagaagactctagcagatgcaccatcgtcattcggagggagccgcaccgcacctagcgagcttggtgcggacggtttcggtgcaagcccatcataccaacgcgggggatacgtaacaccaagcgagcttgggagcgagccggcgggatcaactagcaagaacgcgaacactactccttctgaactatacgcggcaccccccggtccaaagttcgtacatgaacttggtgcttagtttttttttttttttttcttttcttttgttctttcttttgttttcttgatttgcaaagtcagaattataccccctttctcgctcggctctcggcccctggcataagtctatggaactgggacatgaatggttttacgtgaatatgcgcatgctatttccattgaatactggagtcgatgagcggcggtatgaggatcttggcttgggcttatcaagtattatgccagtacatatacatggatggtctccctgcattatggggcttgtttggggacccatgatgtaaccactatacctcagctacatagttaatacattataatcaccattgcttattttctagtttttgtcttgaatgcttttagggatgagctagtgacctggaaattaaattagtgaacaaattacggagtaaagacatgtagagataactatttgatctcttttgtttacgctgtatagatctcagaccaaaagcggccatgagctatacctaaaatgggatgacaccatacctaataaggaaaagagaaggcggtggggcgtggagatatcgatccccgcggaggccagctctctcttcaaatgtgaattgacctggacataaattgccaaagctcctaagtcagagctccacacagatggcatcgcaaacatacagctcgtccgttcgagctggcctcaaaccatcaaaccccgctccccccaacttcgccgatccaaacttcgacccggccgagttcctcaatgactccctatcaccgcttactgtggcatcagcacaacctagcgcctctcggtcacccggatctgttcccctgacagagttatctgcgcaggtccaatccctcctctcccagattagcgcccaaaatatccgtctctcgagcacgttatcccaacttaccgacgaaatccttcgaagcggtggacgactggcctacgaagttgaagtcctacgaggcgagacaatcgggctatccgaaaccctaactgaagtcttacgcgacgatataacaaagttcgtcccggggccctcaccagaagacggacgcaaggccgaacaagaagaggatgctcccacgaacgaagatgagtcggcagaaacagaggacaagaacaaacccgccgccccaacagacccagaatacataacgaacctccgcacactgaaccaagtgagatcgcgcctagaagacgtcgtacagaccttcggcgacgcaatgagctggccgctgcccccatccgagatctcattctcgtcatccttcatctccgtctcaggaccagacctcggccccgaaggccaagaccgcgaggaaaagggccaagaaatgatgaagaagctacgcgcagaagtgactgagctactcgacagtgaaggcggaggatacgccggactggatgctgccaatcgccgcgttgaagccctacggacgctggcgattgtgtggaatgcatcggccgaggaaaaagcccgtaatcggttcgtggatagcctggcgaatatcgtggaggaccgacggcgcaccttggaccagcagcaggcagatcagaaccagcgaggccagtccaagtccagatttgaggctcggcgggatagtgacagtggggcaccggctggtgggctgtttcggaatttacagcgtttgagagaggaaatatatttggagtgaaagaatgggttgttcatatatggtcctgggtgtctgttgagctggttctctacattgatacttggtcttcgctgtatagtattttgcatcttttacgacaatcttgcattttctggtctccataactccctgtctgtatatggctgtttgcactgctctttgcgggatcgccttccatatccgtcgagttaaagttgacgcaggtcattacgtagtcgtgaccagcctcgatatacataaactcgaccttttggataggagcgacgtcagttgctgttatgaacttagggctattaactacactatggggttgagcgtaactgaagggaatatagtccacagactatacagatccttcgggaacatctatatacagagtagatgtagaaatatacagttatccaagacccatgaacgtctaatttaggtgaatgtgttccttacacgtggagacacacaatactattattctcatagccctagatatggttatgaatcatcatctacctgagggtccaaaggcccaccaggtgacgagctgacgaagtgacgggagtggcaccgggaacgttgcgccgatcgcagcctctctccctctcctccaaggtgattgcgtatgcggttcctgacctcttacaatgttccatattgctttacccagtatctgattcgacttatttttgcatgatggcgtcggaggacgcgccactacactttgaagataccaagtcgactccaatgctgtggcacgtcttccaccgtcggtcacgggcaaatcttaaaacaattggtttgtcggtgattgcattgttcttcttctttcttctgctccagtcttctccaacggtaaggattgctttctgctacacggacatactattgccagacctatgacaaagaagctgacctgcctagcgagttgaaccggacttttggacaaagtttccctctcgccatccttttccccagcgcccggaggatgcccaggtcatcctgaatcctcgtaccgatattaatgttaacgatacccttccccacgatctggacaaacccaacccgcgcttgcatgtcctagttccagcctcgcagggctcgcgcggagtttgccgaacgctcacgtcggctatgatccttggatacccaccgccgacattaatcggttacgaccatcaatctcccggagcgactgaggccgagcgcatggtggaccggatcacgcgcgcgcgcaactacctccgagacagcaagaccgtacacgaccgcgactttgtgctgatagtggatggcgcagacacctttttccaattgccgccgaaggtcctagtggagcggttccaggctatcataagggcgaacaaccgaaagctgcgggacaagtttggattcgcaaaagtggagggccaaaatgctggggctgcgcctgagatggtacagaaatacacccagcgcgttatttttggtgcaagcaagatatgctaccccgggttgctggacgaccccggctgtgcatccgtgcccgattcatctctacccccggatgtgtatggctggaagactgatgcctacccggatggatccctgaaccgaccccggtggttgaatcccggagcggtcattggtcaggctgcggacttgcgtctgatctacgatgaggtcctgcggcttgttgagatgcgcacgaacaagtctggagatcacatggccttgacacagatgtacggacggcaagaggtgatcagagaactggagcggcggcgaagagccaatgacttcaaagagttgctttaccggatggtaggcatctctgatgcagcaaatatcaccgggattacccttcggctggagacaggtcaccgttacgagtacggcattggcgtcgactacgagtcacaactcttcttcaaccagatcatgtcccgcaaggacgtcgagtgggtcaagtttggcaacattaccaagatgtccgcgttgcagatggaacatggcgtcccgcgcgaacaccgtatcctcctaccgcaggacattgcatcgctcccgaacccattcatccagtcgcgcttcgcaaaagaatcaacccagcgcccagtgtggaatgccacactagacaagctcccgaacccgcgcgagcgcaactggcacaatatttcgctaatgacgaatgtccactccgcctcggtcccggtaatcgcccgtctcaacggtgaccccaagctccgcaacgcctggtgggagaatatgtggtttttcccatggggacgcgcgctgctgcggaagtatgtccgcgactcacacggattcgatgcggcgcagtcgtcgctgctgggcgggcaggactggttggaggtgcgcggaggtcgaggtgggatctggaccgatgatgagaactgggtcaatctttctgagatgtgcaatggccaagaaagagatctctttgacgatgatctcgggccctggggtaaggaaaacggtgacccagatcatccggtttacaaccagtatggaagtctcattgctgggaaggaacaataactcgactaaagctggactttgagttattatccttcccttttactcactacattattctcgatggatcgatgggctgccgggttgttaagacttcccgttcagctcgccgtccggtggtcaccatccgcctgctctgcgctatacctccacatcgagtttcaagcttatcaggctctggactttaacgagttttggagtaaagatatcttttgtctttttcatgaccgcctgattgggtgagccactattcatgacctccttcgggatgacatggccggattcaccggagaattcggacttattcttatgtcgaagctgggattctttcgactgttatcacgaatagctgtacattaatgcgactggctttgcatgactgcgacgcaagagtctgttgtatgataccgtcatagatgggaccttggaaagggccggctgtttggtgatgctggtgtatatagaaagcaacagaatgaacaagtaaagtattgtcgttcgcatctggactaatcactcatgtaatatctccaccggtttagatacttgatcatttcacagaatcttgaaacggccagagcttttcccatatcgctctctcttcttcatttgctgactcccgagtcagaaaagctgatcacctgttaaactgacaggtgatcggcttttcgtcaacggcggggagtggtgagcctgcgatgcggaatatcctatattatatcaagacggtcaccctttctataacttccttcatactcacgcgaagaatcattattaaattagcgcactcttctaccatttcttaggtcagtagagagtaagcattacatagtatagctatctaacttattctcaaaatccgaatctaacgttaaattaggagggtgccatagagcaagcggcaccgtcaagtttacacgcatcattactacccgtctactatccactcatgtgcctaatagatatttgactgaaagtatgaccctcactgtcagatataccatcttgctcatagtcttccggtttacatcggtgttcagcttgaaatagcaaccagtaccgcagaccttccgctgtcttccacgtggaatacggaatccgcttttttgggatcgtcactacgatcagaagcggacaggatcgaggcgtgcctatgaaagtaggcaagttttccgacgatctcctggagatgattttgatagttcaagtccagtcgggaccactaatagaaggcgagaataagcatgcatcttatcgtaactggtggatgtctgctcacttcgctttctccattgagttgaagaaaatgaaattggctgttgtcggtagaaagaccgaaaactgaagagtcaagcttaccctcagcccgacgttgcgtatgaatcatgcctgaataaagggttagttacgatggcagacatgacgagaaatcacttactcatatacgcaagagtctggcgcacgccgtcagcagattggccatgctctgtttcgaggatgaccatgttgatggccacgctttctttccctttcttcgcgtccgggccataccaaagaaaccaatcaggggtcccttggaggcaatgcactacttcattgtagacaattgggccgaatagaaatgggcacttggatgagatggggattggggttgaattaggagactctgggtccgggggcgtagcatggacagcatcaagtagaatacctaggcgaattttcacagccatctcaggtcttccatctgatctagaaatggcagcgtcgatcattttcaggacgatttctagacattaatagctatcttgccaagcgtttttcaatttggacttactgcagtggtctgcaagctcaaatggagcccgaagctgtgcccagtccgtgttatctgccctggtgaggtggaagatgcgctcaacatccgggaatgagaggacttcgactgaaagtttaggataccgaagtacctcttgtgtcgttatagacgccatgtcagaaaacagaagggtggtgtcctaagaatggcagaggtaacacaatgaccgtgatttactgctgtgggagaagtgagagagaagtgagagagaagtgagagagaagtgagaggagaaaaaagtgcgaggggagaaaagagcgagaagagagaacgcaaacatgaggtagtggcctaccagtaagtctttcctattttcctaacgggcttatttagactattcgatctacatatacaacatatacaacatagaaatgtgctctcttacggaataatagatagaattgaagtcattgccaatgtattatccatagatttgctatttgccaacgtttactcgatagaacacatatcccagtcgttgatccccacagcgtcagattcctgagcgtgaagctgtccagatttattcgagcgaggataagccatgacggctttctcgaagaagtagaccagcattcccagaaccttctcacagtcccgactgcagcgggccatgactggatgaacgctccactagtcaaatgttaacgaggcagtcagacatgtataatataaacgtactcacattggagtcatgagaaatcttcaaaaaccagaagtctttatcatcggtcactagcccatagatcgtgcaatcatttttctttaaatcctttcgacgcctgtgaacgcagccttggaacgatttagctccctaatatgcaatgacagaaatattataggacacttacccatagatgctagggtttgggctatacccttttgcacttcgccaggtttagttctaaccacagcagcaatcagcgcgagatcctccatatcgccgtaccagatcccatagtctagttctccaaccaatgtgtgcttctttttatccaaaagcacaggaccgtagctccatttgtgtttgatcttgatgccgaggaaccgagcagcctcagggagatcagacagaacgatatcacgagcgagaacaaggaggctggaggtaaaggtagaatgtggataggctgcagatgcaggaacctcacgatcaaatttcgataaatccaagtaagcgaaatgagatgttacctctcttgtcagttggctaggtataggaacaggaggcacagtcctgagctcattgtcattgacaacgtactccagattgcagatgacctcgatgtttttaatgagcagagatgtatttgtgagcatggttttggatgtgattctgtagatgaaggattttgatactatatggtgatggtttgtgtatgtgcccaggtatgatcatataatgactgcttgacccggcgctttaaatagaaagctaaattgcctcatccacggctagaaggtctttgacggatagtgacattgagaataactctattgtttctaattttggtataggtcttccatggttgtaggtcaggatatagcataccaagatctaggcctagatacatacatagagtccaaaaaggcctaattgattagttactagccaaagcgctacgtataatagcttgagatgggtaattccaggcaaatataatgctcggttgatcgtggatgtacaacaaaagacagtagtttgaagaagcacactggtcccttttttggttctagatatcaaacatctatgatacaacatccgacttctcaccctttcacgttttcataatccgccgtaagggtttccttgataatagccaaaatagccttaacatcttcatcagacagtctgagctcccgttcttcaataacaccgtccatcaataccaccgcagtgtaatcatcctcctcggcctctccctccccttccccatccacttccattgattcctctccattagcgccttcctctctagcttcctcagtagcaggattgccgctcagtcccaccccgagatttagaatcataacgacctcggctttggtcagtccgtatggctgtagacgggctactaattctcggagggctgtgtccatgggtgttatttctgcggaggggattggtggcggcatggaattagtatccgcctctgggtttgctgaatttgaggttcgcagcgtgccagtcattgcggcttgcgactgtgttttcgactgggaggaggaagggcggggtgtgtagcgggggtatcgtaggaggtggggggatagacggcttgcatagttgtgaatctgggagtttatcagccgttttttcttctatcgttggtctcttggtgtctggtttgcggtcgactgcgcttcacggtcgggctcatggtgtagttgaattaggccataacaccctgtataccgatgagaaggacagcatagggttgctcacttctttgaccactgtattatggtctctgagatctggacttggtgcccagttccccgaatttggcggtggtcggcggggtggattggaggttagataggccaggacctcaacattggtcaggacggcggtttgagggtcaatgatctagatcattgtgttaggagaaatcccgagcttcaagtgaaatagaacataccctcattttgtgtgttgaatgtggcaagatagactggcgcaactgggtgattggactgagaaaggaaaattgttcgaactgccggcagaaactgggcggtgtctttatctacctgcatatctcgaagtatacgaggcaaagcaacggagatgagacggaaacatacatatggagttagttgggactacattatgcgatacatagcctacaggtttacgatccagttgtgaagtatgaacagattattccagctaaaactgtactgccttgttcctaacgagcaccctctgcgccagtgaaagaccggtagatcaacctcaaaatgctccaaaacatgcgagcaacaggaagattgcaaaaaaaaaagaacagaaatgaaaaagtgtgatatcatacagatcccaggaaagccatccggtcacattgcacaaacttttgaaaacatacgcttactctcccttggacttcttcttcttcttcttctcatcctcgtcttcggaacgcttgcgcttcttgccatcgtccttgctagccttcttggcatccttcttggacttcttcaagtccttcttgctgattgaagtgggattgcccgctttatcaaaagtgatctcgccacgctcgagcttccgctcgtatcgcttgacgctgagaccagccttagcagccaattcctcaatgtcgctcttcttggacttcttcttgggtgcctcatcctcggactcatcagaatcctcagcctccttatcagagtcggcatcggccatctcctcatcctcaacctcctctacaagcttcttcttctccttcttggacttctgaacagcggcaggctcctcggaggccaaggcatcagcatcaggattgtacttgcgggcctccttcaagtcgaacttctcggcctgaacaccgttgggagcaatggccacaccacggggcttaatgggcttgccctccataccagcaagcttgcgctcaaggttgaagcgggcctcggtaccgagagcacatttctcctcctcggtggcatcgtcagcccactcggtgagggagtcgacacggataccaagagaggccttggcggcgaggatacgggccatctttcccttgttgcggccggtggcctggccgatcaaagaagcgtggtagatcagaccgtacttgggagtatcgtgcttagtcttgagggcacggaaaagggccttctcggcacccagaatctggatggtactggcggggctcttagacaagctggtaagggaaccagcgtgggcaataagacgggcaccaacaagatcaccgacaagggcagtcaaattgggtgcgatggcgttcatgcgggaagtaaggtagctagcaagttgggagcggtactcgtagaagccaacgacctgctcggcaagagcctggatgttctccagatcctcggggctgatctcggtacccatggagcggtcggcagcagccttgacggcaccctcgatctcctcggggaggatctcagcaagatcagcggagtcccagttggagcgcatacccatcttcagaacgagcttggcgtaggcaatgttgtcgttgaggatcttagccagctcggggaagtgccatccgtaccattccttaacacgcatagcgtaggtgttcagctccttgtcaagatcatcgagaagaccaatggcctggacgatcatagtatcgatcttgtcgggcgagaacttgagcttgtgacgggcgagagagtgggacagaccaagggacatggtagacatatcactgggggcaagaccgggaatgagggttgtgaggtgctcacgaatggcacggaagatatcgttggtggtggagtcagcaatcaattggatgtcaagaccgggaagcttgctgatggagtttcctattcacgatcacagtcagcatacatcccgtaggaagaacctttagaagattgacctaccgagcttggtatcggcaacggcgagggacaccttcttctcatccttgatgctgtcaagaagcgaggccaggcggggggtgaccttgccctccatgatggaggcagcctcctccagagctgaagcagcgctgtcaaacttctggaagctcttcagcttaagactaaagaggttttgttagtgccattgtcgccgataacaaaatttttgcgactcttcagagttggttcattcccactcaaatttttttatttggtaggattggaagacacaattgacgtacagattggagacaccctccgcagtagaggcctcctcggcgatatcatcacgcttgaggagcttcttgtccttggccttcagcagggcatagcccgcgctggtctcagtgaggatgaaaagcgtcatggtgcgcggccacggcgtttataatcgaaaaagaacagaaaagaataaacaagtcaaagcgaacgataaaccgagccgaggaaatgtcgaaaaaaataattagcgtagggcgtgtcggccaccggtgtcgttggagaaattgaatctaaatttgcacggaagaaaaaaagttgaaaagcgggtgccacgagtggcttagccgtgtggctaggtgcatgactaagccatatgcgtgtcctggacggatagagctacagctgggtctctccaatcatcttctccacattcaccatggagggcctattctttaatattaacggcgggtatgtggtctatatctttgcttggtccgaatagcgcccgttgttgactctcttagatacgttgagggcattgttcgcggctatcggaacagcctgttgaccggccagaactattccaacctcattcaatgcgagacaattgacggtacgcttcattgattccgctgactctgtcgtagaatataccactgcatattgattctgacaatctcgtccaatagatgtcaagcttcagcttgctccctcatatggcgacgtccttgcctctctttcccccaacccctccacgtccgatctggcgagccgcatgaccgataaactggtggctgaattcaagtacctggtcgcacaagcgacaggctcatctgccaagtttctcgaatatatgacatacggatatatgatcgacaacattgccctgttgatcacaggcactctgcatgaacgagacacccgggaacttttggagcgatgccacccactgggatggtttgagacacttcctgtgctgtgtgttgcgacaaatatcgaggaactgtacaactcggtactgatcgagacgccactggccgcctacttcaagggcagtctgagccaccaggacttagacgagctgaacatcgagatcgttcgcaacaccctctacaagaactacttggaggacttttacaacttcatcaatacccacccagacttcagcgggacaccaacacaggatgtcatggcggagattctgcagttcgaggcggaccgccgcgctatcaatattactctcaactcctttggcaccgagctgtccaagctcgagcggaggaaattgtacccggagttcggcaagctctacccagagggcagcctcatgctttcccgcgcagaggatgtcgagggtgtggcattggctgtaagcgctgtggccgattacaaagcattcttcgatgctgtgggcatgagccaaggcggtggcggtctcggtggtatgggcggaggtccggcagacgggaagagtttagaagatcttttctatcaaaaggagatggatatgtctaagctggttttcacccgtcaattcaccccagctgtggtgtacgcctggatgaagctgaaggagcaggtaagcctcttagaatcaatctctctgattttaagagtatgaaactaatatctcccaggaaattcgcaacattacctggatagcggaatgcattgctcagaaccagaaggagagaatcggaaacttcatctccgttttctaaaatcgactcgggcactctgtgattttctgttttcctgcctctttgtacttacccatctccctggctggcattttgctttggttgccaaccgcttttcgttgtatcgagtacccagtttgttctttaacgtgagcgcatcgacctcttttccttgatcgggagaatccggtcatctttaatttcggctgtgttgctttttttcctcattcgtatgaggcgtttggcatgtgcttgaccttatccttgtagcatagaagaacaaaatacagatatttattttgttggtatacggcgggctttcctacttgaatagatgggatgctcaagtttaataatacttgccagtccagcgcagtaagccctaattatgctagtaagagatccgttatggatatgtataaaggtctccgattaaaccctttttgcgatagacagtcctgcaagtatcgctcttgccgcaatgaagaagaatacacttgccaccatcattgcacccgaaaagacctgtaacccccaatacgtcccgttttgtctactcaagatggctccagcaatgggacttcctgtgagcgatgcaatactgatgcaagtaaataaaacgccctgacgaacaccaatcttggtcacgtcgggcgagatctggcctagcagggccggtaccataccgacaaatgcacccgatgcaaatccatatagcatgctaaatacaatatagatggccgcactgcctggggcaagaagggtacctggaagccataaggctaggatcacaatggcggataatgagcacatggcaatcatgacgttgaatcggcctagtttgtctcctaggtagcctggtaggattcgaccagggagactgcagactaggttagcacaatggcccttctcgtcaagtcaagatagacagtagtaatacttacctggcagcattaagtatagttgacaagtacccggctaggtcgccgttgacaccgtcctcctgagcttcgacgacaatgtaactgattggcacgaacatggcgaagaatccacagcaggatgccagcacaagcaagacaaacggtagctcggaaaatggactcgtataatcattcagtttcactggccgtggaacattccttattctcgatcggacggtcaagttggcagtgaccaggagtgtgaggatgatgaatccagagatacgcagtgaccatccgaacccaatactaggcaaaagtcgagataacatgcttgggaatacaacgccacccagtgatgagccgctggaaactattccaaaggccaaggcacgtcgtttctcgaaccatgtcgcggtacaggagagtgcggacaaaaagacaaagcttgcaccaagaggactgcagattccctgggctagcaagaattggtagtactccgtcgatatggagatcatcataataccaaagacgtgaagacatgttccaataagaagaagccattttgggccataattatcgaatacctgaagaaggttaacatgtatacctccaggcatgatggggctagactcactcttccaatgacaattccagtcgcaaagaatacaaatggctccaaagataaaatccaggagatgctggacgctgaataggactgtaattgattattctggtagtgctcttggaaaatgccaatggctggagcgaagtgtgtcaggttatcggtggcataagaaataggtatgggaggactcaccattcacccagccaaaagcgcaaaaaaggcagcaccatgctccaaagacgaccgtccaagcaggaagtccttgatccaactgtccaactgcttcctcctcatctgagacggccaccgtggttttcgattctatgggtgccatgtctagaggaaatctggatgatgagatgaggaattccaacggatgatcgcagaagcaagggcgagagaaaagaaaaagacaagcaaaacctctttccaacctttgatgtcaaggaaagacataactagatcatacatatccatgtaagaacagagagtcggagagatcccacagctccccgaaaaatgacactaaaaagaaagtacagaccgaagttacatcgggaccaatcaagtccagattagacagacttaggtgtacagttatagtttagcttgaggaataaaagataagattgacgatctctccttatgatatcataggatacatactgtactccgcatagatagttgcctcctaaacgggctatctcaagccaatagattctgcagaatatattcgtctctttgcaataatagattaatgattatagttttcttcaaggatgatagctgaagtgaatgtgtattagggcatggcacggcccggagaatcgctgcggatccaaatcgatataacccactactactctagtatctacatagaaaatgaggccaaaccctatgatagattcatcggtaaagtgtttagatagatcatggtagatatagagaaattggtaggcgagggtgaaataactagctcgatcatcggccactctaggtttatcatcgtcaatgttgtcttcgccgcgcgacttcctcgacgagtggaagttataaatatggcaggcacgttcgggttccatatccttagatcgtcataaaatgatcaggcaatctctaaatagcttcaattgacagaccagataaattgatcgaatgaatcatcataaattgattgtgaagcgccagatcgatcttgaacaagaaagactacattcaactgaataaggaagatggagaaagaaagaagaagcaagttgcaaagtggcagcggccagttgatatagctgaccactttgcaatgttgcaaccctcggaccttcttggtaaaccctatgcagtttatagacctctctgtggcattcatttccctctagtgttgcgggccacaagattcgggatacaaagaacttgtgcaaggattccagcattgttttgctacaaaacaaacctgcaatcttctagaacgatctgctacctcagtatataaatgtcatccctccactctacttccaagtttgaccttcaactatatctccttaattaacatatcttccaccaacctcaaccctcaagtgtcgacccctcatatatcatctatcaccttacatttccaggtaataccctgctcgacatgccacaagttataagaaccaacaaatcgattaggtagaggctctactcccgtgactcgtcatcacctctgtggtgcatcatgctaatctcgactgtctctctagatccatgccggtattataggccatcgacagaaggtgctttcctgtctctcctgggctcggtttttctggttgaataaaacggggacgtgtggtgttcccttagacgccgatgatgatgaagacgtcgggtttgattgggactccaagtctgtgggtgtggttgatgacttgaccgctgggatagacacttttgagaaggataaccgtcattcccactgtctgaggagtccgcatgtggcacaggtgagtcgttcttgtgtcgatcctgtttcggtgccgatctgctgacctgatgggcatttcgtgtcttaaagtgatgatgagacatccttatatagttatatcctatatatgtatggcaagcctccacatactattcgaaagggtctatactacgaacagcacctatggccagttaagaaagttatgtatgctctacacaatgccgccaacgagggagatgaaagcagagctgcgagaataagtgagtgaactacaaaaggaaggggtagaaggtgtggctaaccgtaactacatatagagaccgtgtgactttgtcttatactcaacgaacaactgcattaggatctatcgacgtacagacaagacaggactaaggagacatggcggtacaagtgatggtgttgaagatcatcgaagatttgcagttgcgaatggcatacacccgaaggactgtaagcctggattgcgattcagcagggctaggctatgcatttcaatttatcaactggcacattcctctcagcggtctttcgcttgctcggctactctcagaatgtgagagcaatgaagttcaccgaagttcaggagctctcagttgcctagtgatgaacatggtgcgcagtattttgccatgggaggtacacgggtatactgtgcattgggctttcaaagcacttatgatgagacacgagaaagcatccatctttatcatcatatgatgaactcgagcaaatgaatattccgaatatatgactttccgcgtatcatttattctagctgcgcaaattccgctagtcgcttagtatgttgtagttagtgttcacgtccacggatggtaggaaatatgcaccctgcaataataacctgccaatgacggctcacggtcccatatgcggccaagggaactgttggttagtatctttgtccagtattttcttttagaccaatatgacacgacccgggatatcaatactgtctggtagtagtgactccacgttgctctctcaattcgtgaaagtgactggttgactgcactcttcggatgtttaggggtccatgaaatcatgtactctgaatgcaataggtgagtagcaaaatggaaagggaaagggttcgagtgctagacaatacccgttgtaatatgcaaggatagagactgatcaatcaagcacagaccgacatgcatgagcttcaatattggaaagtcttacgtctccatgaagtatacagaccagccacattgatagtctagtcccagaccggcgattacatgcatgctgaaaaagaaattccccatttcgattcaacattcattgttcatatgtgcagatggcaaagggtgtggcagaggtagatagtatcacaggaaattcgaaaaagcaagaaaagccagccaaagccagatgagagcacgcgacaggaaaaaaagaaatgacagaaataccagaacaaatccagtgtaccaagtctactgcgagcctggatctatggcaaggggaattgaggttgtgggggtcgtagagaaaacgtggaaattttaggatatcggagaaaaggaaaaaaaaagtttaggcagcgatcagtcatactggaagagaacactgatactttcaccatggtgcacacggcggatggcctgggtatacgtcagtaaatgttcggaatagccggatgtatggaactcacctcgccgaaaacgtggccgacttccagaacctccagttttgggcaacggcgcaagtgctcaacttgatccacgctgttggtcacaacaaccttgtcaagagcactggcgttgatacgctcgatagcgtcgccgctcaagataccatgggtgagaagggcatatacctgagatgcgccttctttcttgagtaacttggcagcacgagtaatcgtattcgaggtatccgccagatcatcaatcagaatagttatccgatcacggacatcgccgaccaacatcatggtggcattctggcggtcggtgattttggtggggcggcgctcctagaaattgttagagtaacaggaaaattgaagagctcaatttgcctaccttgtggatcagggcaaactccatgcccatttgatcagcgattgccgtagcgcgcttggcacctccagcatcggggctgacaatgacagcctgcttgtaatttgggatattgtgctgaatatagctcttcagaagaggtcggccgtataggttgtcgacggggatatcaaagaatccctggtactgcgggtcgtgcaaatccatggtgatgatgtgatcggcgccggcgcaggtgagcaggtccgcaaccagtgtgccggcctgtgcaacccactgtttgtagccaggacgcggctggaaggaagtgatcttggaggaggtgctcgctgcgtcatcggtgccgttggtcaaagacttaagggaatctgtcgtatcgctgcgaggcaggccgttgccccgccgcttcacagggctgccagtgctgtcctcaatctgagctttggcaagacccttctggaggctttcaattccattcaccaagcccaggccttcagttcttccaccaggacccggggttgaaggggtgctctcgaatgtgtagccattgctgggtttgccccccacagatgccttgacgagaggagcaccggccttgtcataaggaatatcactctgacgagagtaagggaaaagagggagtacagcggtgacccgccgggccgaagcagtcttgcaggcggaaatggtgatgagaagctctagcaggtggtcgttgactttaccgccgccggattgaataatatagacatccttttcacggacggactcttggatttcaacccgagtctcccccacggcgaattttgagagcagaacctccgcgggaggaatgccgagaacattgcaaatgctctgagtcaactgagggtgggagttgcctccgatgacgacaagattgcgaaccatcgtgttggcttttgtggatatcgccaggactggagtaagagggatcaagaagaagggcgctcgatctgaaggaaatcaagtttggagggatcggatggagggggaagaaaatctggggggcgatctcggtgagcagtcaaggcagtaaaaaaaaataaagaaaaaacaaaagtatagggattcttgagatgaagaaaacaaatgctacctcatggcggaggaagaattgacacttcgagagacggagacatgaaaccaagaaaaaaaaaaaaccgaccatgtgagtcccgcgatgtgaaaaaagcctctttagagtggagcggacctgtggctggtgcctcaggtggcaaatgacccggattgggtaaagcgcatgtcgtgacgaggccccgcaaaaaaaggccctgcttctggacagacaggaacgcagtaaatggtcagcaggtttactgcttcggattctccatttgctcccggccatagatatacatgatttggttcaattcccccggtcgctttggaaatctcgaagaaaaagcaagaaaaaagaaacatattcatgactcctatgctccggtccccgagatggtatgtactaagaaaagagaaacataaaagagcttggcataagtctcccaccgtgcagtttgctccgagaatccgtcattcgcccgttccgacctccctataatataattagtatgacagttccggtatccgaaagcgggtttgaggctcacaagtcaagttgaactccgttgctcactccataatcctccagtgtaagctgatctttgaaagggcgttcgccctgacgtttgagaaggatttcgtggggttcacggccgattcgagctgccacttgggccttgaatagctctgcgtagaacattagcacactggtggcggtcaatagtaaaagggagacatactgatcggatctgaggcaagacaagggatcgcagctttagttcccaggcgatcattgacatggaccacgatcataggttctgaggattgtggagcgaccggtttcttcttttctttcttcgctttcttttccccgtcttcgcgcggcgcatctcgatcggcacgttgttggccccggtcgcggtcaccacctctcggtctatctccagatcggtcaccctctcggtcgcgtcgtggtgatcgtggtcggtctcggtatccgcgctctaatctgcgatcatcgccgcgggaatcgccagtgcggcttgtgtccttccatcgaaagcctccggtctttctagggcgctctctatcagtgtttccgcgcgggccaggagacctgcttcgcgatcggtcagccatgactatggatggaaatatggaagttgcgtgggtgcctgacaacccagatgtaatctaaacgaagctataaggcacgtgatgaaacgcagctgcccagtggagtacgctagtccaaatttgtattagcgtgtttattcacatcaagagctctcctgtctaaagtacgtttgaatttctccgcacttttgatctgcatcttgaatagacaggctataatgcaaattggcaactgattctggctctgttatttctttcacctgactcctccatacccaaaatgcgaggccgactagaagttcagcgtccctctccgacgaccgtctcctttaccgtatcgaatgcgccccagcagtcaagttcccccgccaaaataatattcggtctccaagtacttctgcgtacggttttatttttctgtgttattggtgtcggcatcgcgcgtgtccgaaacctcttcttccaagaagatgggagggtgataagctggccagccctctggtcgagcccgctcggatccaaactgtgtcgcttggtggattcatacaatccactgggaattgccgtggctggtgcattggtgatatacggtgttttcagaagaggtcatatcggtaggttgagaaggaagagttggctatattgctgttcatggctgattgttcgacagaggaatcgctcttggttattcgaggtttcggaatccagacctcgacatcttcctcgacatatctttctactgcctcaacgaggttcattcctacgacgcaaatccaggatattgtgattcacgaagccttcaagggcttcgaagtccgcttctatttggcggtcattgttgaaggcgagcttgatgccctagtggtcttcccggtatgtaatatcctcagcgttatactctcagacctaattttgcgactagcacatgttgcccaggcgagagatcttagagcaggtttggagaggttctcgacggtgtctttacgatgcgaagtcatgacatacccacagtctcttgcctcaagaaatttttgctcgtgcaaaagcctaccttgctcaagcccgaggctcgatgctttatcaattatatacagcgagattcattccgatgccgcttgtgcaccctccatccttgctagtcttcgctgctttgtgagaagtcccttggcattttgaacttccacggtctccatcttacccttctggtcgacacggatgtatttcccgccaacaacagtatcgtttccaccacaccagaccttggcacctctgtgtcctcttttggaataacccgccttttgccactgtttgtcaagattttccacgttctggtcaccctggctgacagtcaagtctagcagagcacccgctagaatctcatctatctttcgctttctccaaacggcccacaaactttcaacggtaccccgcagcccgaatttgctatcacccttggcggttcccttgcagtttgcagcattgtcaccagcatagacccagttcaaggaatcctggcgactgtcggaattcagatcggggaaaatgcagtcccaaagcaccagcggagcatcatcagccattgcatatattggcttttgtggattcttggtaatgtccagcagttcagggacgatagatggggactcgaatccctgtccgactaggaacagaattgcaaccatgtggcgcacctggtgccacaagaaggcagaaccgtggaggttaaacgagtagacctgagggatactttgagaaaccgtattgggagtcgtcaaatccggttcgggcacacaaccctctttggcctggaatccaggttggccaacataccccacggggttgaccttgggattgacggcttcgatactagagtgaaggataatgcgttcgaaattatcaatctgcttgttggtgtccaacttgcagaaattccggaagtcatgcataccctcgaaatgcttagctgcctcgcgcatagcctcaatgtcgagccagccctcacggaactcagcacgcgggccattgccgttctctgcgcggttctggaacccaaggggcccgggtgtgggagcgaacgcggggttggtgaagaagtacttgtaccgacgttcacggcaggagaagcgggcatcgaaaccaggcggcgggttaggacaccaagccaggacccggatgtcttccggaagcaccctgtttagaacattgatatagttcatctcatcggctacatcatcccactccttttcagtagatcccgagtcaacgcgcatcgcatcctcgccctcggtgggagtcttgggcatgggtcgttgactgcggacccgcagtccaataacctgcccaaaagcgctcacgcccttatcggtacgacctgctttggagtaatcgcatccatcccaataaaggtggtaggggcgcatggggacgcgctcccctctttcggtcggctcaagatcagaggtggtgccgggggagatgagttttgtacgccgcaatgccttccacataatctcttcaacggtaggcagaggcgtggtattgccgtttgtatgttcgagcccattgtatgcctgtcccagatatgcgaacttgagcgcaataaaccgcgttgtgtatttggaggggtcgaagctgcgctcgggtcttggaggtttcggggctttgacaagccgcgtcggcgcaagcactggggtactgtcgctatcttgaggagagtgtggtcgcttcgtagaaggattgaagggctcggtaagaggaatcgcagcctcgtggacgtcggtagcgatgggcgcggaagaagagcagggtgtctgcaacgattcttcggttggcgctgtgaactctgtcgtcttagaggacagctggcgctctaactctgttatgcgcgcgatcaggctggaattactccaggccgagtagtcgggttggcccttgcttttagtgtcctccatggtttgggatgtgagagtgcgagattggcacaggtatcgtgcttgcctgagagcgtgctgtatgttgcaactcagtggaaagagtctagcagacactctccacataccacatcagcgactgagtcaaggattggattggtgcggacgtttaaccggcgggaatcgaaattgaaaaagttgcgcggaggcgctgtttggtgtatttttagtattgagtccctgtacgaaggtgtaattacatgcactttatggtcatagctgtatgtattcaatgtatatcactgtactatgataatttatctgtaaataaattactatatgggctttttaaatcattaataaggcaatataaagttttaataagcataaatgacatgaggttaggactagcgaattaatatatatataaatcaacaactgtgttggaacgccaagcaccgaacttgatcacccaaagtattcattctctgaaatcaaatacaagcggcgaaggtacttatatagactgtcctacattcacaactgagacaattctctgcaatacacttgttaattgaccggccgaagagtgcaagttgaccgatacctggacagttgcgcataaatcgaatcaacagccattccagcatggctgaggcagatcctcacacagacggtaacaaaccagtctccttacttctactcggagatgaaggatgtgggaaatcaacattcttagcgtgagtacctagtcatccgacggactgcagcctagaagctaatctcctgggctatatatatgacgttatatgggaacatgctaacatgattcagtcgcctaaagagtggaaggtcatccccatcagggacctctaataatgactcaaataccattgaactattacgagatagtgatcagcctttcatttacgacatccgattcgcaaaaaaaacattcactctagaacttaacgacacatccaacccaaaccagcattggacaagccttcgtcctgacttggtcgttctagcctatgatatctccaatcgagacacacttactgggctaaaggaggtaagtcaaatatataattggagtaattgtaaattggtgctggaatttgacactattgcttagtggcgaaatgatattacccgttacttccagtacggtcacggcgagcgccttccagtaatgatgctgggcctgaaaagggacctacggagggaaggcgagggaatcatctatccacaagaggtgagtgactatgaattggagtttcacgccttgaaaattgacagttatctaggcctatcgtattgcgcaggaacttgtttgcgatagatatgccgagtgttcggctgtcacaggcgagctgcttgcagagacgtttgaagatctcgctagattggcggcaatgacgaccactgcaaaaggtggccagactgagggcacttcttgcgttattctttgattatttcgtcgtccatgttcgcatatgcggctttctaatgttgaacttctttatttttctattcttagtagcctatgtttcagctagagagtatgctctatgcaaccactaagatattacagacagcagaccagattctaaataacaaataccatggagacaaccaggacagccaatacagatatcagtgagtgcctttctagcacttagaccgctaccgcgctgactaccaggcagggcgggtggaacggctgtcgtctgcgagctagcgatccaagtactagaaaggcttattgagagaaagagagatatactaatacccaaatatagacgaacaatgaagtctacagccaggcactacactacaaaacctactggatatgataccgagcacaaccttttcagattactagaatacacacagggaagaaccaaggtaacgattaagtccacctcgtgaattgacagcacagggctttcccccagaagcttcgtaaataaaagcaactggatctctttccctcataagcgccagtcaatgattggcaatggcaattcctccccgatgcaaaaacatggaaataaaaaaaaaaagtgctggtaagatgagaccactgaggcaaaagattgaaaggttcccggtgaaagctcgttttcttctgtttttcagtttcttttcgtttttttggagaattgcacacagggactaggatagacatgtcaagggaatttgagggagattgtaatccattgttgtgaatggagtagatggtgtataggagaaaacaagagcctttccttgattcccgtgcctcgaaggacccagaaaatcatcaatcatcccagatcacccaactttttattgtgatcaaacttcccccctctcaacgactatccttgtcaccgcggagcaatttaccacttagcctcaccagcggcgggctgagcctcagcccactcggtggtagcgggagcggagctggcagcccagtcaccaccctcggcatcccagctggtggcaccagcagtagcggtggcagcggaggcagcagcgaaggcagtgccggggttaccagcgccaggggcggaggcatcccagttctcaccagcgaagccggactcgacggcaccagcaccgatctcatcagcaccggggaccttagcctcatcggcgatctccttgttctcctcggcctcggggtcgcggtagaagtagagatcgacaacggtatcccactcggtctcgcgggtagcgagggtaccgcggagacggaggacctcacgggcgagcatccaccagacgagaccgatggcgtgacgacccttgttgttggtggggatggcaacatcgacgaagtcggtgggggagtcagtgtcgcaaagggcaatgacggggatgttgacgtaagaggcctccttgatggcctgggaatcagtgcggggatcggtcacgatgatgagacggggctccttgaaagaacgggtgatgtagttggtgaagttaccgggggtgaaacgaccggcaatggcggtagcaccggtgtgggaggcgaacttcaggacagcacgctgaccgtagggacgagcagagatgacacagacatcggcggggttgtcaatggcggcgatgatacgggcggccaggacgatcttctccctattgcagtgaaacatatatattagacactatattacagtcagaagtcacttggctgtcgcgcataccaggtcttgccaatgttcaggacgttgacaccgtcggcgcggagcttccagaggtaaggctccatgtgcacctgaaggttcttggaaccaaggtggcactgcgcggcaaggagcatctcaatgtcctgcgcggtagggttgaaaaccgggggaagctgggaaggggccatgttgggcgattgatggattgatgagttggaggatcaatcgtctggctcttgtcgtggtgatggagggaaaaagatcaaagccaagccgcaaaattgttgcactctcgcgattcgggagaatttcgcttgcgtgcgctagggctagggctccggggctgggcagttgattacataatattagtcttgattcctcgttcacgtgatactaggtgcctgagtcagcggacgtcctgactaggattagcgtaactagacctccggccgcaagatttcccgaccaaaggtcaatggaaaagagaagttgcttgtgacaatagagccatctactcgccagctacgcccaccatgcccccgcgcgtttcagtccagtcctctctgaaggcattgaccggtatgctacttgaaatccgtcataccaatcgttcaattacctgggtgctaaccaagacttgtttaggatcaacttacggatataccccgttgtctaattcgatcaacactactaccagagctgtgtccagcaaggttcaaattcgaaagaaacatgacccattcttgatggcccaggcgcgccagcgcaaggcagcgaacgtctcccgccagaaagtccttgcagaggaacggaactcctcggttggcgaccctgtgaagagccagccgacaccatttatcctagagatgacagcaatccaaaccaactcgcacatcccatcatctttggctggggatctcaactactacttgaagtcgaatgagctggatgccgctcttgacttctccaaggatttgacagcaccgcttaaaaaccctgatcgcaacacagccgatcctcaggttgagaaggaggcagtgaatttgcataatcaagagcataagaatgcccaagaagcaatcaaccggattgtgaacttgaacaacggaaacaccaaggaccgcgtgcgcctcaacattacaaagtgcatcgaaacattcgggcgacactacacagacttaaatctcccaccaaagccttcggctgtggtccatggatctgcccctgtgcatccggaacgcgcgccgcgcgtcggacccgatactggctctgcagaggtgcaagccgcgatcctgaccgtgaaaatcatgaacctctcccgacacctcgagactgccaacaaggacaaacacaacaagcgcaacatgcagctactagtccacaagcgccagaagctgctacaatatgtccgcaagaaggaacgcggaggtccacggtggcagaacctgatggggacattgggattgtctgacgctgcgtggaagggagaaattgctctatgaagggctttgtttaataagaggtcttttgtgtgtctgtaccattctcttcttttgtgattggctggctttgaaaaaagtatcagcatgttaccttgtatcatctatctaggagctagcgagggctacttgttggtctatgtctctatttctatgtttcgcccgcagagtatctgtacaaatagcattgtttcttttcccacatccattctcgtgttgaaatcatctgaagtagccaacttgctattgcagcataagttctagaatgtattaagtttcctctaaatgatcagcggtattctcatatgagatggcagtatctcgattatgtaggctatttattggctatagatgtttcattttgtattactatcggaatgatacagacgtgtgtatttcacttctggtctttagtgctaacttggctaataattatctttttgatctttgctatagttttaggaaacaattttagtatccagtgatataattatcgacgttgaacatatatgtacatagttacctctaactactagtatttacgtactccattgaatatacgtaactaagagatctcaacagtgtagttagttatcgcatcttaagaccatagctcagggaacgtcttgaagatgcaacgaaagttacaggaggaattgcgtttggaaaactcagtatggaaaattttattgttcgtgaaatagccagttaggacatgaggctggatggtcgagtaaggactactttttcagtgaaggcggtagcgctggaagtttattgtcaagtatgtgacgatcccaactacgtatatctctactcaacatggacggagggtaagatttaatggacgtgataccaatgcgggaaccaggttaatctatctgctgctgtagtcgccggacctgaatgagaagtttgtttttgccgagcttcaaagtatataagacgtaattggacctcctccatagatgatctattaagtaggtcagggagagagacgaaagcttttcctttgcccatttcctagattcttggaagccttcatctttcatctttcggaggccctcttggtcattgcctcatgttaccctctttccttgtatctactaagggcacgatagacttccgctcctctgtgtttcctctgttcatcaactgcgtagaacctctcagttcagtcgttccaacgtaaccgggtcttgtcatctagaagctaacaggcgatggcccacgatttcggtctccaacgtctctgaagtcgctcattagagaacccacgccacctaagttaacgttggtttcccgttgcctaattttgtcggggaactagacatcctcgagatcgacaaccataactttgccatcatcgcagctcgcattgtcgcagaacgataaattgtctactttttggtcccagtgttcagcaccatgctcatataatatcttgagagcttccataagccgggtttccaaatttttctcgtggaccttgatcttgttgtgagcgaggtcatagagagtttgacgatgactgttgtgatttatggtggaatagtccgttcaagttctaagcggtgtactgtgctacatcgtgaatgtagctgcttgacattttttcgcagtgatggcttggccgtctagatagaacgtctaatgatgtgtgagccggatcaagagatccacatcgcggctagaaatatatattttacctgggaggattgagggtcagggaaagggcatcaggcctgggtagtgtatagagtggaattaacaataacctagtgaaacaatgcgtgaaatcaaagaacaatgtcaataattggaacaattggaacaatagagtcccttgcgacagcctctatagagggacataccgcctagggacccggtattctgccgggtcgcgccttccaactccgaaaaagttatatgcgttggcgaccaccagacaatcgctggcgactgcgagacaaaccgctctttccttctaattttttggtcgcgtccaccgcattgtttacctatttaatcccctctcttccccccctctctctccttctcctcttctcctctccatcacccacaacattaccatccagagcattgcctttggatatctctcaccagagtcttttgtgatcgactctaccaatcagtcagtatttacatttgtaactagatagcctttggatatctctgactgactgatttcatttcaataagacttccctcactttccactcaccacaacctcgacaccaaccatcctcctcatcttgcgcatttcgccaagatgagactgcggtcgaaccacgttcttcggccagtttcggagtacgtcccacgccgccgtcgccagacgcggagtgcgtcggcacaggctgggacggaggccgcgacagagactgtgccagaggcacagtctgcaccagaccttgccgagcagtatgctgcagaacggcccgctccaaagcggaagccagttaagagagctggccggaagaaggtcagtcagaaaacaaatgtcacaattgttcattactaattcatgttcctagaaggccgcgcccaagggcaagaagaaggccgctcccaccgcggagcctgaagctgctgccggcaccgaagccgacccccaggaagaccccgttgcgctcattccgtctgtggagcaaccagacacccgtacgttgccccccagtcccacccaggctacccaggccacccaggctccccaggcttccccgacccccccggtcccccaggctccccaggctcctccccagcgcaagttcagagaacgagtcatgtcggcctttcggtatgggagagccagcgcactcctccaaagagagcctgagcgagccccttcccctccgcaaacgcccgtgatggagtatgcctggccgcctggccaagtttatgatagacttggccgaatcccctggtcacttccctggaccccaccatccccctggaggaactttcctcgcagatttcctggcgtcaatgccccggatgaatcccagctgacccccacggaagaacccactaggaaacggaaccgatcatccgaagatgatctttcgccttcgaaacgtcacaagttgaccctccaaaccccacctggcttcgaaaaccgtcctcgcggcagctctcgcagaacatatgcggatcgcgcgcgacgacgcgaagcggaaaggggaggacgaatcgatcgcaccatttaccgtttcccccaactcctggctcagcagggagaggatgcgaggtctggcagtttgacccccgtggcctctcaggcaagcgaagagaccgcacctcagggtaatcgcattgtcccgctatcctcattgccttctgcactcccaccgaatcagaaccaaaatcagaacagacctaattggcgccaatggatattcaattcagtgactggtatttggggacgaggcaatgcgcctcaaactgcagaggtcccacaaggtaggcgcccctcatatcatggcatatatttatagtggctaacatggtgattctagtggtcgaacctgaacatccaacgggcaatgactccgtcgcgacaccttcctcagcccccccttcttcctctgttgtggcgtcacgaaatttcgaatcgcccactccaagctcgcgcgttacagagccacaaaccgcaaactctcgtctgacagccagggcacgcgctccacaagtcggcacaagaaagaagtactcctacgatttggacccacaagggttcgacccagaactgctcgcgcgcatgcgcgccgggatgtcggatcctgcggacctcgaacctgtaacttcaatcgagcaagttcgtgcgctttacgataacgaatcgaaaaagcgcaagcgagaaacgtcacccgatgtcattccacaccctccaggatgtagctacgggtttgacccagattacttcatctacgatgacgatgattacgacgacgacttgcccacaggcgagcaggaactccaaggtaccccgaccaaacacgctacagtcagcgatgcaccggaagaggagcatgtctccaaacgtttgcgccaagatcccccaactcgacaggctacagtcagcgatgcgccggaagaggaggatgtctccaatcgtgtccgccaagataccccgactcaacaggctacagttatcgatgcgccggaagaggaggatgtctccaatcgtgtccgccaagataccccgactcaacaggctacagtcagcaatgcaccggaagaggagcatgtctctgacaatatccagctggaaagctccaacgaccaggtcacgtcggagcccattgagtattccgccgaggaactccgcaaggcccgtcagatcgcagaggctcgtcagaccgcagagcagtacaagccgaagacccccagtcgtcttcgcgcggcccatcgcttctcgagtagctgtaactcgtctattgaggtggaaaccgtccaacgtcgcaagatgagagaaacctcaatggctacggcatgccccactggcgatctaagccagatcgagtggcccgagactgaaacttggattgagacctttaactgggacgatcctaactttgagaaatatcagagaggatctttcgtccgcactgatctgtttcccactgaggaggcacattttgatgcttgtcacaaggagtttgctgaccttcttgctgctcggcgtgcagcttagtaaatctaacaaaaaaaaagacttgccagagagggaaccttcagaaatacctggaggtcgcatctccattgagcacccggttcccccctagggaacgaaatacaactacgagattccgaagagcaagcttctcggcctgctacttatcaaaaaaattgaaaaaattgaaaacaacgaaagaaaaagatggaagtcctccgggttccctggcccgcctttctaggctggggctagggctcccttggcccgccttgggtctctgatggaaccaggctggtgccggtttttgctggcccgccttggagctctgaactgggcttgggtcgagccttggaggaaatcctgtatacattctttcggcgttgtgactcgttggaccgccttggatgcatgggcctacgagtctacgtctttgtctttttcgtcttttgcgttttgcgctttgttcttcttgctatttagcgcatgtaatgagtgaatattagcgttgttaaggagcatttgaaaggattgcttagcttcccatacaagtcaacagattgtaaagactaggctcgtctagagtgacaccgagaaattaaacccaggatatggtattgatatagatatctattatgctattttctaacctagtcaaagcccttgaactcactatcgccattggcttcctccgccttgctagcttggtccaacaaccgctgttgctcgttcttagcacgaatctcctccagcatgcgctccgtttcaagagccttctgcttttgatcctctggcaattgctcccatctctccttctccttccgcgccttgttgaactccctcttcttgaactttttatcccgttcttcagtcttctgactccaagccacactctccgtagcacggcgcttgttaggaccctgctcagtgccttgtccattagcagcctccgccatagcctctttgcggcgcttttcttgctgcttgtccttgtacgtgtagttggaccaatcaagtttaatgcctagcgtccgatctccttcaaaggagcgggcttcgggcatcttcggcagcttgaggagtccccatgcctttccgagagcttcccagtccagatctgcaactcggaagatactgcttgcttggtgtttgctgtagctgcgcagccagctgacgaacgccttctggcccttgtcgtgcatagcgcgatcttttaacaccgctttgcggaccttgtctgtcgcggctgtggcctgttcgtccgtgaactcgggtaggttgtatggcgccacgggcgttttgcggatttccaggaacgagacgtagtcctcctcgcgacctgggtggatgaggacgatgctgaggcctcggcggcccgcacggccggcacgaccgcatctgtgaatgaatgttttggggtcggagggtgggtcgatctggactactagatcgacggagggaatgtctagaccgcgagcggcgacatcggtagtgaggaggatggagggcgttgtggaggtaatgaagcggttgaagttcttttggcggacgttggcttggtgtttcccgtgtagtgggactagcacatattcgtctcctaggattatgggtagtattgtggcgaggtagtcgacactggagcatgttgacacgaagaaaatggttttttgaggtgtgggctggacattggaaaggatgtgcttcagaatagcatatttgtgaagcggaggtgttgtcaagtaggtcatttgcagactgttcaatggttagatcggtcatttctgaatgggggaaaaattcaaaggacatacctcgctggagtgcgcttttcttcgacgccagctcctctgaccttgacggcaattttgacgggatttcgtagaccaagtcggacgatctgatcaacagcctcactgatactggcactgaacaatcctgtacgtcgctgcttgggtagccggcctaagatcttctgtaggtcgtccttgaacccaagatctagaagtctatcggcctcgtccaggacaagcatttcgaaagatgcctgagggcagtgaacgtgaggcgacgaaagtaactccaacaagcgtccgggtgtagagactaatacgttgggcgaatttttaaggaataactttagatcttctgccggagatgtcccgccgcccagaagaagttgtgggacgaccttcaatgtcgaggaagaggtcttcgcacgaggagcaccatcttcggcgggttttaaggctgcggccgacgctgggtggaactccaaaagggagagaagaacttggtgaatctgtgaggccaattctctgatataccgatattagcaacgagctctgcagacctggacttgcgcattacccaccttgtaggagaaatgacaatggctccaacatgatgcttcttgagaggctgatcaaggcgaagaagcttttccagaattgggatcaagaatgacagtgtctttccacttccagtgacagcttctaccaccacatctttgtgctgcataaacagaggaatggccgaggcttggactggagtcatgcgcgtgaagcccattgaggccacagcgtcgagggagcattctgacagcgggggcgtgagagcatcccacgctcttgaagatgacttgggaggcatttattaatctcaagagacaccgagtcgtcaaattgcttcacgagccgccatcgcaaagaaaaaaaaatatccgttatcgattagataccagacacgtgaccacggctgtggtcggaaaccgagatcgtgaatctgtttttctctcgacttagccttgcttcgtttactttacttttacatggtataacaagtgcttggtgatcgcatcatgtactggaatcctgccttgtgtctccagcttattcgtccataagtaacaataaagattcgtcacgtgccatcgaaccgcctatcattgctttgttagcaagcccattgatattttcgtggctcattcgtttgcgacaacgcagatatctgtacgcccaccttctggtgtccttcgagtcgtaccgattccttctttgaaattaaaggcgcccgacatgtcctggtcacaacccgtaccagaggcacctcgcgtgctgtcaccgaccccctccagatcggaccggtcagagacacccgacggatacatcgcaccgatgacaaggtctgcagcccgtcgccagcgtgagccagatggttcagccgaaagttctggctcagcgcgagaatcaagatctccctcggctcggcgcaaccgcccctcacaccccccnnnnnnnnnnnnnnnnnnnnnnnnnnnnnnnnnnnnnnnnnnnnnnnnnnnnnnnnnnnnnnnnnnnnnnnnnnnnnnnnnnnnnnnnnnnnnnnnnnnnnnnnnnnnnnnnnnnnnnnnnnnnnnnnnnnnnnnnnnnnnnnnnnnnnnnnnnnnnnnnnnnnnnnnnnnnnnnnnnnnnnnnnnnnnnnnnncccccatgatacccgcttcgccgccgcgctcggaaaagggtaccgactcgaacacccatctatccccaccaagcattaccgacgcgctgcgcgacttgtcaagatcaccatctcctctcggactgatccccctgcatgcacgctaccgcagtttcattcatcgccatgaaatcccgcgcaagctcttgcacgtgtcaatcgggttcttgactctgtcgttatacagccaaggcgtccaaacgctgcagattacaccagtgctctttaccgtactggtgcctattgccgcaacagacctgatccgccatcgcttcgagagggtcaacaaggtatatattcggtttatgggtgcgctcatgcgcgaaaccgaggtcaccggctacaacggcgtgatctggtatctcctcggagcgtacgtcgctctccgcttcttccccaaggatgtcggcgtcatgagcgtgctactccttagctggtgtgacaccgccgcctcgacattcggtcgtttgtacggccgctacaccccccgtctgcgtcccggaaagagcttggctggtactatggcagcctggttggtgggtgttgtcaccgccgctgctttctggggctggttcgtgccttacattggcgctttccccaatgacccagaagacgcttttatgttcacgggacgcttgaatctgctcccgaactgcgttcgcggccttctgggttgggagcctagtgattcggcggtcatcactggccctttgtctctaggcgtcatgagtttcgtctctggcgtcgttgccgctggcagcgagttcattgacatttggggctgggatgataacctgacgatccctgtgttgagtggagttggcctctggggtttccttaaggtctttgggtagatggataaatgatacactcctgattatttctcagcgcttgcacaatattccctgctctttttttaatgctatatctgggtgcttgacggttagtattcgggcatttttctcttttgctcctctacgttctggtattgtgctgcatcaagaattctattcttgtttagatagacactggtggaagccatgcacattttgatactcctcttcttttccgtttctattctttggatgtgtgttctgcatagctactttctgggacatggctttggtacgttttcggatatatgcatagggtattcttatttacaatttctgcgacatatgtacatggcatccagcaatccatcctcgagaagtcagctttcctgagtcttgatagaggtactcggcatgtttatccaacgccgtaggttaacaaaaaaatgcggttgctccacattgttgtatgcaaaagctccagacccgggaaaattcaaattgatgccatcgccaatccgccaaaacgagaagaagggtataagaaagatattaatcaaacgaggtcaagaaaactgacgcgtgggattcttttctttttggcaggctgagtctgtctgcgcgctgtgctcaggctatcggtagctgagccttcgcatggatcttgttcatgcggagacgggtcgatcgaccaaaagccgtcgtgcaatataatgttttccaagtgccctatggtcttatgcttcggcgttgtgctcgtcccctttgaagacttcttaggagaccaatttacctcattaatctcattgttttcgtatgtcttcaagttcaatggtaatgtatgttcgggctcgagttcgggcttgggatttgcttggctgcaagatcggggtggtctgatatcttcgacttcagaggaacgagtccgaacttttggtgcttgtggtgccttcttcgttggcggttgacgcaacgagcgagttgcggtgttttcctcgtcgattttcgatgacagagaaagggactcgatggctttttcgatgtgttcaaccctggccttttcttcacactgcaccttgggaatcttcttggtcttagataaagtcttcccggacagagaaggcagttccaagagtgctctggctgggaagtcctccgtgaaagtttcagattcacaaacgtcggagaccgagtagctaattttgagtcccatgcgtcgtgtcgggcgagacggagaataatcggtgttcatgtctagtgcgtcagattcttcaatatcaacctgaccagttcccaaagctgtgcgccttgatctaatgcgagactggtccgatatggggtgacgcttgatattggcagaaggagacaggttacacattgaagagaatgtatcaaggagaccatcgacttcccgagaaacgtagtgcatcgtcagtgaagacctctgcggaatatacatgctcggagaggaaaatatatcgtcttcctggtccacaattgttggcgaagaagacccagaattggccacaagtcgggaaagaggattctgagccgatgtagcggctttcaacaagtgtgtttgtttagttgttgacagttcggacctttctttcgtgagagttccgtatttcaggatactcccccgtttcattccagcatcaattggtccctttttcttgggaccggtgcgccgagtaccggtcttctttttcgccgcagcttcttcggctttcgcggctttttcagcctgttccctctcccaatttttgacgacctcaggaacacccagtcttacgacagtctcgaatatccagaccttctcgagggagaacggatcaaattgttttgtaatccgagtcttcgacggtgccggaggtggtgatccagcaactacctctgggtcatcctcttcctcagcttcctgtacactaacttcggacggcgggtttggttcctcggcaaggagatccagcccaacaatatctgccggtagcatatctagctgaagttctggcactgcatcagtgccgaaacttgatcgggttcgatacaccttttgcagaccaggtgggcaatcgggcacaaatgagaaaccaggcgacacgcctagaactggtctctggagacggagtctgtatgagacaagaggctcagccaacagtctgatcaatttccttgcccccgatcgataattccattcaaaatggtctgcggcaaatgttcggattgctagggggtcgatatctttgtcccaagcctgtacgagacgggttttcagaagtgccatctcttcatcaccggaaactttgggctgggcgtagtactcgagaatttgtcggtccggaaaagcgtctggaattcgaactgctgggtgtttcctcgtaaagtatccactctcattctcctcaagttcatattggagtctttctctccactcgttcaaccctgcatccacgtctgcttgcgacgcaagctcctgcagaagatcctcgccaaatccagccttggcaatctctgcagcgagcttgctgccgcatttcggaacaccagatggtaaatagtcccctccactgagcatagcgaataggatcattcccggtcggtcaaggggtatattggatggatgtccatcctgtcccattgcatagcatgtaacatgagttgctgaagagctgccgcttccgctctcttttgagaagttcataatagttaaagacgatccgaacatcaatgcgtcgacatcgttgctcatgacagcgtctacaatacctgcctgctgtaaccgtgcacattcggcctctgcctcgccgggtgcctcatgccacggaaacctgaatcgttcgatgaggtccttggaacgcttgatgatcggcgcactgccataactgcgagatgagactgctttgcctctcttaaaagcaggtttttgccgtccatcatagacaaaaagggggtggactggcaatgcaagtaacttcaataatcgataaaatagtgtgcgtagctctgggtttcttccgcctctacccgcttgaacttgaaagagccagatcgaaatgtcgactgcaatgcgaatcggtcttgctgtccgctcgaggtgcgtcactgccaacttcgccagagagatacgctctcctgggccaattgcattgatgagccttgaaaagttagtatttggattgaggaatctggagatacgaagtccggcttcttatgcgatggataaacaacgctttcactcggtgctcatagcgatatatatgttttccaccatgtaaaataaaataggatatatgacttaacttacccaggaatacccatgccgactgtaagcaatagaaatgggaagcagttcaagtgcccatgtggtgttagaagatgtacaatatgcagtggttttgcggagagaggaagttgtgaagtaaataaagacggcccgatgtagatccgttgcctaccaacgagcttcccccaaccatttgggccagcttatagatcttatttttactttgtctttgaatttaaaccgatggcattgaaacctcgacctgtgcgcaggtgaatcgaatatttgtcgctacgaaccctacgaactcctgttgctcccagaaaggggagcaacgcgcccaagctcatccaagcatgtcgagtgatacaccctcaatgggtgccagtaaacgcacatcagcaacttctggtctgcggaatatccagacagcgagacctgtttcccctcatacaccacaaccacattcgggaaacccctccttcgccagcagcacatcaccgggttccacctttcgaagcgaagacgatgcgatcatatttgagataggcgcacgatggctccgcgcaggctttgaaggaagcagcgcacctgtgtgtgtggttggctttggacctgaagactcgcggagagcgggggactaccgaggatggattcagggcagcagcggtgctggacggctagcgcagcccgtcgacatagaagagtggacacggacatatgaattgtggcggccagattctcgagaaattgatttgggcctggttgaggataagatcgagcgcgcgtttcgggagacatacaatcagttcctgttgacggatgcagggacatctcgcctggttcttgtcctgccgtctctcatgccacacccattgctgtcgtcattgctgtcgacgctctttagtcgatggcgcttcccgagtgctacccttctgtctagtgcgaccatgtcggccacggctgcgggattgcggtcggctttggtggttgaccttggctgggccgaaactacggcaacggcgatctacgaataccgcgagatgactacgaagagaacgacacggtctatgaagcatttgatgcaggaaatggggcttcttcttaccgggtttgcttccggaaaccagggtacggagactgtggataagatctctgttggattcgcgtactgtgaggaagttgttagtcggtttgcctggtgcaaatcgcaggcagaagaagatgaaaacttagatgaacccggcctgaaattgtcgattccttcgcccgcaaatcccgaggaagaatatatggacgtgccgttttcacgtctcgctgaacctaccgagaaggtgttattcgcaccaggtgtcgcagaacatgaattggacgacgaagaaaaatccttgcctttgcttgtctacaacacccttctctcactgtaccctgatgcacgaggaacttgcatgtcccgtattgtctttgtgggcggcggttctcgaattcctgggctacggcagcgggtccttaaagaagtctcgttcttgatcgatcgtcacggatggagtccaattcgaggcaaagcactagagcgacagcgacagagattggaggagctcagactttcggcccagaaagcatccaaccaacctgagattcctaagagcaatgtggaagcaccttccagcgatgacgaacccgccgacccctcgaaagaagtgcctgagattgatttcgtggaacaaaacctccgccgacaaaacaaagacatcccagtgcctatccaaggagtcttgcgcgaagttgaatctcttggtccatgggcaggtgcaagcctgacaaccagtctgaagatccgggggatggtagagatcgaacgagagaagttcttacaacacggactcgctggagctacaagagatattgaccatcctgttcctgatcgtcgatcgggcttgagatctggcggtgatcggtcgagttggacgcttgcaggctgggcatgaaaccatgtacatttttcaaaaacaatagataccccattggatttccgagccgttatttccctactgtttctctatatgaagcttcccaaataagatcgccgtgtttacgaggatctcggcatttaatcgcacccatcggttgaatgctggaccggattactttcaatctgaattattgggaggatgagattgtaaaagggagtggtggtaatgggggtagtttttgtcgaaattttagatgtctattatctgctgcacgcattgagggagtttgcatgtatagccaaattcaattctattatgtctgttttcggttgtgaattggccacaggtggctctcattcgcacagattgaggcaatgaatgccaaataagcgctacgcgtagggtccacgtagagatagatattgatccaatgcaagtatggttgcgcaccgtactatgaatctaaatagtgccaaactggtaggtagcccagttaacggcgggcccatcatcaggaccaaagatctggtagggaatacgaccccactcagggttattgataccatcgatccaatcctcggtctcgataacgaagcatccatacttgttaacatgggtggcaccggagtcaccaccatcagcctcgttgcgcttcgcctgcgaattcttagtggcgatggaaccgttctgtccactgcaggtgtagatctgcagcgcggcctggttggtagcgacgtcgaggctgatgccagtggagctggatgaggcactaaggaccgtggcgatcgagttagacgcgtatgttgagggccggtcgacgaggaagcacgtatcatagcctgtgcagccggcgccacagaggtcgtaggtcttctcgatgtccttgccaatgagtttgggactggtgaagtctagagctccttggtaggctttctcaacgtcgtgaatggtgccgttcgggattaagatgctgtctccaccaacgaatcgctgcgagaggggaagctgcaaggtggtatccttcaacacgttgggttctttgaacgcgttcaggttccagtatatgtggttagacagcatgatgggggtcttctctgtaagagagagagccaccagctttgaagtcaactggggaagacccttggggttggccggtgtcttctcggtagacacgctgaaagtagcatgggtaatgacgtctcctgggaacttctcaaagccttgatcgaacaaggtgaaggtgatagaggcatcgctgtgcgaagtgaccgtccagttgcgcatatcatatccggtgaagccaccatggagagtgtccacaccatcgttttcattctcaggaacgtggtacgtgttatcatcaatagtgaaggtaccgttcttgatacggttggcatagcgaccgacaaccgctccgaagaacgtgcgattggtttcactatcatgcaggtattccttggggtcatcgtagccaacgatcacatcttggacgttgccgttgcgatctggaactagcaaggaggtgagacgcgcaccatacggaatcagcttggcagtgatattctcagccttgatcgtataacttttgaagtgatcggagtttgagtcactagcaggcgagggaacagcctgagacggcgacggtgcagcattggccaaggcaggcagcccatacagggcggctgtcacataagacttgaaatgcattttgattcccaaaagagttgtaactgaaagaaacaagataaagacgaggaggagaaaccgaagcgtaattcggggacggcaaactgatgaacgtagccaaccgcggggtgcaggcatcttatgagaagctccgttcggatcgcaataaacattccccaatttgcgctaaactacctccgcatggctttgacgctagggggcggggacatggacagaaaccggggtaaaggttctagagagaccaggatttatccgaatgcaggtggtgtgatcgatatgcaggtcaaccattggactgttgggcaaagcggacgccagataatgagggggaagatctgagcccctattccggggtgttgggggatgtaacttaagggacgtgggtccagtcaagctcaagaggcgctctgccactgacggcacggaacaaatgcttcgctgagtccatgcggcaaaactccggtggagttcaaattgcatgttcaccgcccggagttgttagtcagcgtcctacccgtccacctttccaacttgggttagttcctgccgaggtaaccgtggaaggagcctctaaggttccaaggttcaatcacggggtaattccatttgatatgttgtttattcttaaggttggctcccaggaggaacttgccttaaccttatagacatcccagtcaggaatttatcaatgtcagccccgttctgagagttattctgctctcaggctcgggcgcactcacgggaagtagttggcgtccatctcacctagtatgtcgacgacagccttcgtggtataaatcttgacaggaatcaatccgtgagtgtgatatgttgtatattgtccagatcatctcatgctcagacaatttgagccccgggttgtgcctgttcattccctttgcaaatactagcaccttggcatagaaggggtcaaaaaagaatgtcctttcgtcagtcacactattttcaattccgccgtagccaaaacctcgtctatggtgatgtacgtgttttgcagtctcggcgtcgaactgggtgtagatgaagtataccttgtttgggccagccgctgccacgtatggagtatccggcgccacaacctgaaggccatatcctggcctttggtacgtagcagatattccccatggaaagttaatgagccactgagccctcgcatggtaggaaagcattcagaaacatggtgattaatggtagaaagagtatgtgcagtatagtcaccagttgaatatgtattgtgtctatttccgtgtgtccttctgcgtatgtttcttctctcaaataatttagcggtcagaggcacgtggtagataattactgtcccctccgacccggagtaccacgcctaccagctgcctcgtaaccgaagagcccgtgtgaccccaaattggaccccaatagtcatcctgcgcccgtgatcagccgcagaagtgttctgatcactgcgggccgacaattggctatccgcagtgggaccacacgcagtatgctggccctaatgacatcgatgataacgggttcaccatcgactttgggtttgctactctgtagacacctatgtacttgattctatctggaatccttggacttctatttccgttgataatagggacagaaaagaacacagaaattgagaccaagagccatcaaacatcagactcgaataaatatagtatacaagatactaccatcagtataccataccaactcatgtgaggcagagtaccggatgccatgactagtcggagggtgatgagtggcagcttcgacttcagtggggcttcctttctagtgcaggaacatcttcacccgggtgaaagttacacatataatcttatcccaccaactggatattgtcacagtggttccgatagggccgttgtgcagttcaccacacctcgtgctctagtattatgccgatgggacttcctttctagtgcaaggacatcttcacccgggtgaaagtcacaaatttagccttattccaccaaccagcatattatcacagtggctccgatagagtcgccttgtaacccgctacacctcgtgcttcagtattatgccggtggcatcctcgtaaaggcccgcagtatagtttccatccaaacagagcaaagtagaccccgcttggggtctatagtatgtaatgacaatgaggtttaggaatataataaggtcactacgatttcccatcattcctgtatttttttcactcaagcacttgataatctacaaacattcccagaacacacgttctttcatctctatctacaaggtaagatagcccttcgttgaagacttcgttatacattagatttaatgcatggccccagaattcagacaaaatggcaattgtggcgtgcaataactgtaccaagcacagagagtgttctgcctactcaggttcgaaaatgtactgcgaccggtgtgctgagaaacttgggttgaaaacagcgaaagttgaggcaacaaagacggaaaagaagaagtgacttactactactactgggtctatgttctggtcagtactattacgtctgatcgattattgattgctatgtatactaagtcttatcagaacatgattcagggcaatgattgacggtgttaggtgacttaagatatgaatgtgtctgttttctggtttggtcgttcaattgtttcaagattgactgaatgaactgtggctctgcatcgatgaaacggatgtcaatgtctgggctttgctagctttagatcagaatttcaaggatggagagtcgctcaagtttgtaatcttccagttcttgttttgctccataaggataagccatacatctcaaactgccaggctacgctaagattattcttggtgtagcatccagaagaccgctagatctacaaggtctctgactggtatagatcctgcgctaagtaaagaggtaaacagcgtccgacaaggtgatggcgagagaggcttgcttgactgggtacatggctaggcggactatgaacttggttgcatgtaccaactagacatgcaggtaagcccaatagttacctggccctccggtcaaaagaaaacgagtcaagatgcatcgcttcgaattttgtttaaacgactaatttcggtctatcactatgcggcaactcatctcactcgcctagtcagagataccacctgtagaaagtaggggatgtgggtatggttgatttactttgcagcgtaaatttcctttttccttccttccgttacatggtattgccatctttggaatatccccaagccctgtcaaattcattccaacctccagggggcgcgtcccacatggccaactcacgaaccactgtgtcgtagtatccatcgctgggcatgtttccctgacagacatttcctccaacagcgatgttgatgaggatcctgaactcactcatcttccttgtgccaggcggcttctcggccctcatgatgggcgtgccatcgatcaaccagaccaggcgcccgctgcccgttgtttcgtcctcatcccagataaaatcgtacctcacccctaccggcgagctaatgttggggatgggggtttcgagaacgcgatgcttattccagtcctcgccgttgaagttgccccaatgcagacaagtgtggttgacagcatcgccgttccacgcttccattatgtcgacttcgccatcctcaggccacttgaaggggtctttaggcagcagccaaaaggcaggccagatacctcgggccaccggcgccgtaatcctggccgatagacagccccgtggtcggctgagggtctggtgactcgacagtctggcgctggtaaacttctgggcagggtcgggattcccgtggttgatcagagcgcgcacgatcaccgcatcgccctggcttgaatggaatgagttatgcgggctgtcggtataattctgcgattcattgttgccccatccatgttggccctgttcgtgggcaaagttggcagataccggtacttgaggatttagattgggctgccagtagatctggggttgcgagtgctgttcctgataagctagtgggggcttgctagcggtcggaataggcggtgggggattgttgtacgacggtgctggctgagggttgtcgtgatggcttagttccgcccaagccttgtctgccttatcgataatgccctgaagggcctgtctgaatggcatgttgagtacgacctcggtatggatgttagggttgcacaagtagtgtacctaggcgccggagaaaacagtaagcaaagctgacgtcatgttgtggatatcccgaaaggatcgaattcctcaaaatcccctttcacaacctttcaacatcctacttggggaaatattgctcctttctgagactggaccgatctaatcagtggacacgttatgcctccatgggctagaccaagactcagatcgtatgaactaccacctgctaagtagttagtgcctcaggcaccgagaatatgcaaaccctacaaatctctcggagcatcacaaaatttcaagatcctaatatatggcctatcgagtgcgctagaacttaacgttagtcccgtcattacccattttatttcgagataatcaatatcattgccaacacgtgcctctctgctctcttgcaatatccccaaatatggcagaagcatgccatcccccgcctgcaacagaactctctaaagcagagcgcttcaaagctacgcacctcgccgcgcgccatggcaactaccaccaatattacgccaagtttcgggcacctaccgttccagacgagcgcctttctattctcccatcagatatcctccgcgacgcgcgagtcatagacctaggctgcaacgcgggcaaactgacctatgaggcgatagcgcactgcggcgcggccgccgcagtcggcgtcgatgtcgacccgtggctggtcgagcaggcgaaggcggcgtacccggacgggccgtgcacattcgagcactttgacttcgtggatgcgtccgcgtacacgggtaccgcgctgggcaagttcgacgttgtcctactgctctctgtgaccaagtgggttcatctcaacaacggggactccgggatgttgacgctatttgcgcacatacaaagcatactgaatgagggcggctatctcgtcgtggagccgcagcctatgagcaattatgcgagagcttcaaagaagaataaagaattgagagagacgtataagacgattcagatcagaccgccgtttgagactgagttgaaagcgctgggatttgagaggatattggaagttgagagggacgaggaggggtttgccaggcccgtacatgtttggaaaaaaaagtatcataatacgatcaatggagatggcttaaaatgagtcgcgcgaattgacttgcaccgggaagacgtagacttttcggttgcttagtaggtaatcaggacgaagtatatttgacacagtatttactagagaagtgacgggttaagatttgttgacagggatcccagagcagcataatccttacatggttatttggagacgaacctgggctattttggaagcgagatgaactctttctagctacattggaacctgtcaacggatatatggcagcccttttttgcccaaggaacaggaaacagaaattgtaatcttcatatcacttttcatgggtttgataaaagaaacagaaatacatgagtggttctagctaaaataagccaactaaaaaaggttaaaagaagagggccctttttgatcaatctcttaaggaaaccgggccctaattgcctaacgagttcaggagtcatttgtcgtcttagtcgaataccaagtcaactcacgttgactccattccgcaaacttagattgataagacacactgtctcttcgaaaagcctgataattggcaacttctgtcttaagttcccatctcgagagggccttaaccatcaccagtgtccggtccttgtagcttttaacatgaaccacaagtcggacaatactgtccgtgtgctgtgatggctttgttctagactgaccaacgacgaaattcgaggcgataggccatccacagttggaagaaaatggtagcaagtgcagtggaaatgatgctcgcaattgacataacgatgataacgctatctttgaaatcttcatccatagcgtgaggagaggcgaggttgaaatgggcacatagagagagggaagaagaagtaagaactaagagagagaaaaaagcagccgaagccaaattcgtcgcgggccatattctatggttggctttggacatactttgtgctcatcataaaattcggattccagcaagtatcagcatcatgttcacttcttaatatgacataatctaaaatccaaaagcactattctggatctggatgtggtatgctttctatcatacaattcaattcaagaagcgattggcattgacattggcattggtattggccgtctgaaagtcacttttattgccattcatggtatttttcaagactcgtcattgaagggtctctaaccacccgcctagtcgtaggctagtaagatatcccaaatgcgtcgatccatgttggttgtggtgtcttcacggctctgactgggagactgtttaattgttcagattcccatgaagccgcaagtaacgtcgacatccaccacgggtccctattttaagcctagatcgggtgagatctgaacagccttatggtggtaaatgatctctacaagcaaacagagagctgaagcctatcaaacaggacaaacatggcagggtattcaacatctctgaatggcttcatagtggtcgatcaggtgactttataaggtgatccgatcaaccaagaatgggtggtatgcattcacaatagtacaaccaaccattgatcttagactacatatatggctttatttatgtctttttatggttttttcatctgcttcttcgtctaattcttgtactactttttatgtggttttcaaatagaaaatgtactagttcagcaccacagaaataccatggagcatacaatagcagagtattattgattaattatagattttgaatatgacaggcaagttgaagcaattttatctacttcgtaataggaaagttatgaattggtgtcggccccggcaactccggtcatagaagtggatattcatattctcgtgaaacttgaaacttgaaacttgacaaattggcaaaccgatctctaattacttcccaaagattaaacataaacacccttttggttgttttggtgacgccaaatctcaacctcaccaccaccgcgaatcaccccaacccgcatggaagaaagcaaattgtgggcggcattggagtgagtgtagacaccaccgttgaatatggcagtagcatccttcccaatggccgatgaaatgagggttttaccaccagggtgttccttgataaagtcggtcacgtcgtgaacaacaccggcaatggcaactagagctttgccactctgagcttcagcaatgaaatcgtcccagtcgataacaggcagctgatctagaggaacaccccaatcaagcttggcgcgcttctggtcgagcttcttctgtagttgttgcacacggcccttctcgatttcgttggctcggaactccttgaggttggttgccagaccgagctgcttccacatccagattgaccacttggtaggatcgtactgccaccattggatggcattgcggtagtcggaggggaactggtcagagtttagtggatgcaaagtaaatataagggaacaattttcttacctcgtggtggaagttgtggtaaccttcgccgagagtgatcagtgcggtaacgacgtgatcgcgaggggagttcctgtcatcgaatggctaaagcgtgtcagagcgaacggaaatatgacaagaacaggatatggacaatgactaacctgctcacccaaccaatgggcgagagaattgacgcagaaggtggcttgctgcacaaacgagaaccgaagaatgccagcatatacaagaccacccttccaatcaccccatcccaggccagcaacgagcatagggaacaacatcccgaaaaccaagatgaccgatccataatgcttgtgctgccagacgacgacgggatcctcgttcaagtcggagatatcggtcctgcctttgttctttgggttttggttcagaaccatccacataaaatgcgaataccagaggcccttcatgacgctgtatgggtccttcactgtgtcggtccatcgatggtgtgccctgtgtttactgctccaccaccggatcgacccttggacggcgccaccgccgacgcatgcaaggaatattctgactggaaggacactagagatatcagatgttagtcaatgcttcatccgaagcaactagggtgaggcagtagcaggcttacgcttcgtaggatcggtgcgcccacagacgatggtagccggcagtgatgcccagtccggtccagaagtagtagagaattgcccaagcagcagtggctgccctcagcggtgtgtagcatgcagcgatgaggccaccgacgggtacgatcaggatgagggttgtgttgacccagttgacatgctggtaccagttaccgagtgtgacaggcttctcgctgatatgctgctttccaccacttggctcgggtttcgccattgtagtagtggagacgagacctgtaggtctctagtgtttatgaaattgtggggatgggagtgatggctgcgagatgagaatatttcaaatttgcggaccctggatccagagacattatttaacataaaaaaccgtctagctatctcatgccaatgggtcaatcgtcagttgcgttgctcccagcaagaaagtgttgaaccgttgggaatgtcaggcaatgcgatgcttagggaatttctccgaactctcccaccccagccctaaaatcagcaccgaatgattcgtcattgctggacccattattagttaaaagattttccattttcataattgatgcttaaatcatcatcagaaatggggagtccgtcgttcgccactgatcggaactgatccactcatctcgccggacatgacgaaaatcatggaatccaacgttaagtcatgatttttactcaacggtttagatataggtatcgtatggtcggataatggtcaggtggtagactttgctacgagttgttagaagtccatggtagcctaggtgataacatatctaagtgatctagttacttccattgaacaaacgatggatgatatattttcaagcaaaacatacaaaacttactcatccggacttgttttgtttttgatgtccttgtttgtcgggccttcaaatcgcaagccatttcctgagcttgtatagaacttcggattttcccaacatacaggatctagttccatggcgcccgatatcttgcgcacatacacgcatgcggttgttaattaggctcgaaggacccctcctaattcccccgcggaacatcatctaatttgatttaacacataattgctcgcacactacctatactccgagatgcaagtggtcgaagtgaagaacaagaatcttctgaactaaagatcacagttgggcgacctgacgtggtgataattccattctacatctcgggcaatgtgacaattggcagcaaacctgtcgaattgaaacggcactaccatacaatatgtcctttgctgatggaaagggaggaaggaaaactaggagcatgggttttcaagctcggataatagtaggccttctctgcccttgattaccttgatcaccacggagattgcttttcttttctagtttacccgttgaaatctatcctcggcctactttatagccttgatacgtattataggccctaggatgcatcgaatgcgcttcaagcgtaagcacgtgatgttagaggcccctcgcctcgcaccgcctgcgcatattccctttttgtattgttcacatcaaatactttttataccattctagaagccagccctggctttgaagcagcgatggaaccaagccacgagacataacaagcaatgagatcgcaatccacgacttacgaggaaaagccaaagaaagatacccagcaagcaatcagttctacgatttcggacggagccgaacggacaattcgatcatcagaacaagatcttgtttcagaacttagatccgacagggaaatattgcccatttcatcttgccgtcaaacaggcacgttgaacgcgtggttgtggaatggtccatagtgagtcctaaccatacctattgttacccattcctaagtatcgatagatccggtcaaatatagaaagagtagtgaagaaatttcaacggaagatttctcctgacccgagagcacatctgttaaaatggtccgatatcgaccactcaaatgccgcaccatggaaccgtgagtcggggtatccggatgacaaaacgagcataatagtctggattgcgttgggaaagcttggtgtagataatggattcatatatgaaatggagagtggccaggacatgagtctagatggccgtgaggggatacctttttctggtaacggaggggggttggcagtgttgttgttattacacatgagatgtgacattaattagaatatttggacctggatatggtgaactaacccggcaaggaatatgattatgccccttcgaaaatattagttagttagtacatactccgtaactaactaatcagctttgatttgattaagtggggatcacgtgaattgtcggggatgagcgggaggctcaaactctaaagagggttaggcccaccttcccgctccccacacttgttggttcggtggattcggcgctttgccgaaggatccagaagcgaagagacagagacacgacacggcctggatgatattggtcctgaaaagcggaagcaaaggatggaaaactatcaacaatgcgttcactcctcaacgctgggtctgagactaccgcagcgctgctcggtgccattacctttattttgctcaagaaccccagagtcatgaagaaactgaaatgcatcaagtcggctatcttgaatacaatggcatttgatcggatcgaaggtcgcttaataattaccaatatctttggaacagctcatgggtaagcctttaatatattgggtgtgttggaatcgattgtttgctgatcatatgcataaaggcaatttggaaataaaattgttctatccgccacttacatgtcgaacctacgagagttggttgacagggattgactccaatgccttcttgagaggacgatccgattcttgcaacatacggggtctggttcgccatccctacaagctgatatggagattctcactgaaatctacggacatatctttacaccttctatcggttcataagcgttagagcagccaatttggttcttcgactgcgctccttctgagtagtatcggataatttctttattctccacgatatttggttcaaacgctcgaagcacactgcctgtcttttctgattctctgttttcgaaaggccaggagaaggaagagagaggagggactacaaatgtattagactagtcgactgcactctggaaaataagagtcctggcaagtagggtcaagttaccgcaaccatgctcctaaaatatgtgggctctatcagatatgttacatgactaccctctcattctacaatactagatttacactactagctacatcaacagttagggatatccgagagttgacccagtaaatgataatttagtaacgaagaccatcgagttctcaaagaaacaagaatcaacatcccgcacaagcaactagacagtgtcacgccaatcctcaaactcccgcgtcgtcagagggaagaccgcaacgttgctggacgtatctccatcgtcccctttgaaaaagaactagacggcgttacgtccatctttagttttaagaaccatcctctccgcgacttcatctggagattgcatattgccgaaaccataggtcggtttgccacaaatggtgccaatcacaagcttcgccagttgatacttgcggagattagacgggaccttttcccttcgtcgacaagttaagataagcgacttccactctgcgctaggccaataaatacgctggatatcgggtgcagggagagactccagaaccgagttcgggatagtgatgtgaataatgacagtcgcgctatatatgctgcggcgtttagcatagtaggcataatattcggccacttctcgctcaaaagcaaagtaaatatctgcgtgtcgtcccgagaaatcagtaggtggcgcggatgtaaggcatgaaaagtcaacgctgctatcattgccgaatagactatcaatctaagcttggtcaatacccttgtatagagttttgtaccccggtgcatttgcagctgcacttgttacagcgggagacaaagcagtttcgtgtgacaaccaaggtaccaccgatatcgatcgtcatccaggtctggaagcttcccgctgactagccatatcacgcctacgagaagcttcttgtatcgcccgtagcccccggtgtcgtaactgaatagtgtcctgaacccagaacttacaagtttcggttagacggatatgttgaaacttaggatccataatagcctcctgaagctcgcggttgatgtgggggtcagcgggagatgttgttcttcttcgtcgctggatctattcaagcgtcgtttatgaattcggcgggtgccatcatatagaggagggctggccagccctgatgcctgcagatttaccgcatcgtcaggggtcagaatacttgcccagtcatccctggatataaaagacatcgtggattttttatgcgtggatgaatatgtatgtagtgtgagattccaggtcgttcttgaataagaaagagtacatttgactaaataaagaatataagaaactatctgcatacagcataatggggatcatgtgacaccttccagcaatgaaaatgccttcaatattggaaagcatctactactaagcctaattaggaagttatagctccgtgaatataatgagcccgggcgcgctcaattaaagcaattggtcaaaagtttataggaaggtcaatttcacatttgtaaaaaatgagagagaagaaagacaactgaaaagacatatgaaaagactaccgcggcaactccccggggccacattgataattgtcagatatctagtgttctcacctcaacaggtaaccagccctcacatttttctaccaatactgctttgctactgatggtattagataggaaacgccgagatgtataagctcgaggttagttgtgggaagcatggattagatggcattttaaggacctgaaatccgtggattggcagcccacttcatcacctcagagttaataattatttctatactctcatatcttaaacaactattcaatttgagacaagatacgcgatagaatttgttggacccaaactatgaatacatccaatgtcgacaaatcaactatagagtcgcgttggcttcggctctttgccacaatttgagccaaattcgaagtctcgaatatcgccagtgaaaagtggtatctgacaacttagtagcgattacaatgacggcagaatcacatttctgtagccagctatacatgtacctgatacgccaacacgtattcgaccacctctgcacgctggaagctgattcgattcatgcgcgcagcgcgaggcgcttcaaggaaatggttctttagggttcccaagactcactcctcagcatcaccaaattcatgtccgatgaagatggggaaggctccttcacccgaaaaggctggtagtgtgacaatgcaaataatgtgcgcagtatgagttgatcaacattaatatatgcgtacaataccagtaccctatacgggttatttaaatatcatcgagactttggctttgggttggctgatatcacctatgggttggtcttgtccgaccgccgggttttggacgacgtgaatacacaaatggtagtcttgccggttgtcatgggccaagacgtgccgcgaatgtcctactggcatatcagaggaacaaggtagtcgggaatctccaaggaagatgtgcaaatgcatctggtcgttgaagcttgcggtgtaacattgaattaagtgcccagtgtgaatgacgtcgatttgtactccgtaaagaattgggtcgatggcaagccgaggaaatatttcctattgtcacatctccacttatgtttcaagacacaaagggggaagagaagatcgtgtccaataatagaactccaaagggttgtttagggagatgcttacctaaccacctcgaggaccgctctttcgtaccgcatcgggagacttgtttatggcttgccccgcgttttctctcttatttatgtatcataaagtaggcctgtgaatagttacgagacgactgcactttttcattgttgcattccttagcgtgcgctcttccacccctttggtggcacgcgtgcctcccgagattccatcgcatgagtccgccatgtcggcctcgtcgcgcagccagagctcctcccccgatatcctaggtcctccgggcgatgcccagtacttgatctcatcaccgatcaaaccattcgcagggcgccaaagctggatgtctcctatggtagcgaaatcacggactccggccaagcgaccgcgaccgcgcggtagcctcagtcccgcaaaaagcgcgcattcgattcaattcaaagatgtcatactccccgggtcgccagcaatgaagtttaatggtggtcgacaaaggtcactctctccggaaaagcttcaggagggaaatgtcagcccatggcgcatccgactcacgctggaagcgacacaagacgaagatgacgagaaccggggtagcccgtcgcgcaaacgattaaagccctcggccataacaacgatgataccattaaaggatgagaggagtccattgaaggagaaaacgcagtacaagaggcgagggcgtcctcgaaagtctgacattagtttgtccccgtttgctgcgcgtacccctcgccctggacatacacctgggccggggaatacacctggaccggggcatactcctggaccacaagctggtgactctcaaccacgcaaaagaggtcgaccacggggcacgcccaggcccaaatcacaggatttccagttgctgggtgaccaagcaacgccgactatcgaatatgaccaccactttagtccgatggatatcgttccaaatagtgatgcccgtcacaaccagcaattcagtccaatggacaccacgaccaatgaaactggcttaggccagcatgaatacagtccgatggatacaatacctagtgatgctagtctgggccaccgaggattcagccccacagatgccctcactagtgacgctagccgaagccaacaacggttcagtccgacggattcgtttgctggaagtaatgcaaacgccagtcccttgaatctcataggggatgtggaatccgatgacgactcttgggggaactcggagatatcaaatgcagagcttctccatccaacagaacccaatctcgacaatactcgccgtgattacggccgaacgagtttggagacacctgttatcggagctacggaacatcactttttggatgatgagaatatccactccacgccttctaaaatgccatcaccgacacgcgagagagctatgttgtcatcgagagcttctcgtaataccaataccgctagcccccaatcgcgcacatatcctactccgacccccacatcttcgctagccgatgaagaaaatcaaacccgacaagccgactcggatcatttcacaaggacggagaccgaccatgctgaaaccgatcccgttgaagatcccgcggacgagtacgatgaattcgacactatcatggaaagtgaaggattcactatgatttcccttgatacgctcccgtcagccaagcagcacggattcggctccagcgctacgacgaacagcggtcccaaaccgaaggaagtcggagaacggttgagacgcaaacttcccgggacgatccaagatcttcgaggtgattctcgtgctgaaaaggcatccagtccagtcactacgggcctagattctgggctatacaaaattccaagcacccatattccggagaagtacactgcacatgcgatcgagcggcaatccgttaactacgtgaatgagatcgcctatcctgagctccctgccgcatcgtctcctgccaaatcaacaattgttccaaagaagaggacactcaccagtttggctaaacttgttcgacttagcttggccctacaaggtccctttaagccgcaacaagacgagtggtctggtaagagtaatgcccgtcacaaaagacgtcggttggagggtgtttttagcacattcaacgctgaaacgcagcgggaactccgagctgctatggggctaggacaggagcttgctatgcgccggatgctcgccgaggaagagaaggctgcggctatagcagcagatcatgcggctgctcgtcgtgaggaggaacgtctcgaggaagaacaaggagaacaggaagaacaggaagaacgtcaatataatggcttcaatgacgaagaatcggaagagcaggatcaggatcgaccctttgaagacgagatcaagaagcaggagcggtacatccaaccgtcacgttccagtctcaacaacttcattcagcaaagcccggtgtccccccagaaggcacagcgggaggcacaatggcagcttgagcgagaagcagtcagccgccaggctcagacggctgcaaactcacaatccgtcgtttatattgatagcgatgataatgcggcggaagaggatcggggcatcgaacctgaacatgaacaacgatttgaatatgagaacggaaatgagtttgatgaagagcacaacgattctgcacctgcacccgtgccagaaccagcgtcagaaccagcgccatatgtgccccaagactttgagcccgagcccgagcccgagcccgagcccttggaagatgaggatgatggttatgacgacatttggcaacttgaagcgaatgatcacagccatgtctcacaacacgtcgaggatgatgatgtccggtctcatccgaacccgcttgcacgtcctttgggcaatattgccccgatttccgcaggtaaagactacctgagttcatctccttaccctacctcagagcagaattatgtagcgcgcttcggaccgtccaaggtccgcgagctccgtgagcaaaaggtcgatttgtctgctttgcttgcagaagaggatacaccaaaccgcgcacggtattacaatggaacgagtacgcctcgtttactcgcccgcccgtcagggacacagaattcaccaatcaataattctgtcatgaaggatccggtatcgcgcactccagcgcgcattcgtttacaacctctctcccattccagcccggatactcccaacccacggatccacagtccacaaatcgcgttacttgatgggaagaaatctccgaagcctatacaaagcccgcctatacaagagcagttggaagaagactacgacagcagcagcgtttctagcgccgctctcggtcaatcggaatctgccaacgtggattctgcctccaccccgcaacctcgtcagctcaacaaagaggagccaggatcatcctggttcagtaaaataaccagtttcaccccgcaatggctgaaagccccgacccgtggccgaagctcgagtgttagtactattccggaggaagcatctgaattcgaagatgaagaggaaatggccagcattgaatctgcgaaggagcttgagggacatctccaggatgagccgctctcaaagcaaacgagccaatcaccggcgagcaattggagacagccatcaccatcccagtctccccagatccagcaagatcctcatcctaccgtggaagaggaggaggttccgatgaatgagagaagtgtttctcgggacctccgagaagaagagcagccggtatctgggcgtggtgtctcgcaagatccattagagaacgaagatgtagagccagtgaaccaccagaatggggcatccccagggccacgaccacttgctgtcttcggatacttttccgatgagcattacgccgcgctttgtcgtatctaccgaattgccaagcgataccccgagcactttgaatatcacgattctccagggcgggctgccatcatcggtgattggatatggacctccgatggtcatcacggggtgcccatcacagagattcaatttgccattatcgatcgctttgctcaggagcttgctcgggctgatatccaatatggtggcagcggacagatcgattggacagaagccgatctgcatcggagactcattagcatcattattggcgagcagatccgagaggaaagaaaggccaaggccaaccggggtgcttctgtggatacatggcgatgaatgtatatttcttttgcccacttctttttgtctcatgtacattttttggatatccgatgagcatttggcgtcatggttttgttttgaatacgtctgttcttgttatgattatgattccctcacggttattggttaggcttgtgtgcagcattgggctgttttggagggtttattgtgcccgtaattactttaggcgtctttctctattctctagccttgtcagttggacatgaatgtgggactgtatacttccaagtttgaccaagtgcgaaagtaccaaatcccgcaaggggatccttgacttcaactgcgaacaccatgtgtatattgcatctggagcacatggatccagccaactatggaggtctgctgcatcgagatcccttatttccccgagtatctgacagagtagggatataaacattaatcgcatgagttgagctcagtccaactcattgtacttccttcgtacccgctagtcaacgtcagcgtcaatccaaacccactttgtctcctcctaatgaaacaactgtacaaccaaaccctcaaactgtcaaaccgtcccagaagcaaacacaatctacattgaagtcccgaccaaccctgcagtcctccgccatctagaccaaccacgccaacccgcgcttcctgcacgatcgtatacttctcgcgtgggcagccaagcagaagccggagagcctcgcagtccccacctctgtgcgaggttcctgcgaggtgtccctgcacgggttctcgcccttgagagtcggtctggctagatcgcgaagtaccacatgggaggcgacaccggaacatttataaaagcaagggttggtagcagcgaatatgggcagcagaccgttcccagagacgaatatcaagtaacgtagctctatacgtcgctcatctcatctattcctttcccatacatatagtctatgtgtgtcgagatcccaaccatgtcagtcttcacaatcgtctatcgagccctaccaccgctaccgctcccctggaagcgccgaacaagtctgaaaggcaaatcccccgagctggaaatccatattgatgaaaagaatcccggctcctcagactccgacatcagtccccacgccgaagaccagcacaatggaaccgtcttcatgcaccgtgacgtccacggccccgtgcaggtagcggtgaagactcacgcacaccacaacgcacccaccccccaatcactatcatccacgccggacaatatcccgggaccggcgtcgggcccggcttccgagtgccgggtgcactattccagccaggcgcgtccgacgcgcgcccagcttgatcgcgccgttagttgggcgagtattatccgcagtcgggaccggtggacggccgagcaggagagggagcttgtgcatgcgaagagacagctggggaggtgtcagaaggcgtggagttccgagcaggaggtgtggttgacctatgtatgttggcgactatttttgctttctttttcttttttctttttctctacgttactattgtattgttccatgcaatcgagttcgatatcacatttctgagtctgagtcccgacaggagagataacgaactatgaactaatttttgtcggttcaggtccaggccctcagcgaagaaaaggaggcccataatgggtttctgtctatgcggcacagacagcaggacgatgaacagcaccagttccgtaaggcgtggaaacggcggcgatcttcgtcgggtgatgatgaggtgcagcagtctgcgatcgagactgcgaatcgattggggaggctacgtcgcttgcagcgttatagttattcagggcaacggttgggcgcgacgggatcgacagttttggctgtggagggatgatttaatgacgacatggtttctaagtgtagggttgaaaagatagaggttaatttgtattgttcacaattctggagtattctaattagtagttgaatggatagaatggactggcatatctaaatctagtttcatatcatatcagtatcagtatcagtatccaatatatcagaattccctagacatactctcacaaaccccctagcgatacaaacctacgagctcttctacttcccatcaggccacttcctaaacaaatctgccaacaaatccaccggcgccgccagaagggcagcagcactctcgaagaacggctccgtaggcgccatcggatgcgccctcgacggaacaaacatcttaatccgatccagcgacttcgtcaacccaacactctcctctttactcagcaactcctcaagcctaggcagatccacatcctcctcatgtctcgcatgaataccgaaatcgcgcataaggccctgcagcgtcggcacgaagcgcgggtccgtagacgaaatatcctggaacgctttcagctggtgcttgacgccatgatgctcgagtctgtttttatcgacgatgccttggccgtctgggagggagtcgatcagcgccgggtagacgacgagttcctcgccgacgaggtggcgggctagctcccaggtgaattggttttggaagcgggtttgctcgtctgggtctgttgagatgagaagtttgcggctgtgggcttcgagttcgaggtggtcgtgttttatggcggggaggatgcggctgtggaagtttggggctgcggcgtcttggctgaaggcttggaaggttggtctgatgttgccgcttatgaggggattggcggtttcggcttttgctcgtcgtgttgtcattggttttgggatgggggtgtggatggcgagggcgcgccggatcatgaagataagatagaagggtagaagggtggtttggtgcttgggatgttgttttgctgtagttttggaaatatctggagaatccgcttaatagaatagttataatagtcggtgatgagttccgtttttgtcatgatgatgaggtggatactagccctaagtcgatatcagtatagaacatcagccagtccatgccccagttgaacctactattcgactcctggatagtatatcttgggggagactcggagttgtattgaaggttagtttgatggagggaatccgaggtggttgaaggcaagatagccctaaagggttgccctcaagcctgtcatcgacacaattgccatctggggaagaaacaccggggataagctgcatacatcctcctcgcgaatggccgagactatgatatagattgacaaccgcctaaaaccaagttacagacttgaaaaacaaggtatccgtgtaaattgtactgcccaacataggggcaaggaacctagaaacgaagtgctatgcgtgttccccaacgcccagcggggcgaacatcagtccgaaaaagagaaaaagaaaatagtcacagaaaaagaaaaaattcaaatcccaaactcctccgaggtccatccctcacagcatagctaatatgatcaataaagggtaatccatgaccgcgacctgcggtaaacaccatccatcccatcttaacgtacatccgaaatttcatgcgcgtatccctcagtgattgcgggtacgcttgcgactgcgctcgcgttccatggccgcaggctggaacatctcgtagcccgggttgtagacggtaggagtccagtcgacacccattggggccgcgaaatccgggtgcagttggctgaagatggcaggatctgacgggtgaccatcgacctcctctgcggttggaagaggtgccgccacgagttcgactagagatgtgtcgatccaattagatggtttggcagcgaggcggctgatgcgagcgcagtcgtcgtcaacttcctcgttcatcagggcagtcaatgggggcgcgttgccgttgggtcgcgcgtggtgattggagaggacgtggtaggggaggatcgggcgggtggcgggcttatcggccagatcagccagggcgctcagagcactgtgcgcggcggttgtgcgggtagatcgggtagcatggaaattgtgactagccgtgcgcatcatatccgccgcacttggggtgccgttatcttcgtggcctgtgccctcgggtgtctcatccgcgtcggtattgttaccattcgtcaccgcgccggttccgtgatctgggcgcttggatgtagagaagaaatggacagccgccaggtgtgcctggtttgcgtgtgcgttgagttccttgtcggtgaagagcgagtgaatcgagtaggcgggtgccacctgctcctttgcggcctcggtcttgttgcgcttcgcgggggtagcatcgcctgcgtccagcgcaggcgacccattgtcctcgtccggagccttccgcttgcgcttgtgcaactcggacatgaaaccgttgcccaactcgtcgaggtcaacgcggtgacgggtgtgccgagtggtcttgcggttgccgtggataccaccagggctggcagggttcgtgatactgaactggttggggtggaggaggagggcattcgtgtcggcaatgtcgagctgctccttttcacgcatcagacgggcgcgctttccggagatattctgcaccaatcgctctcgaagggtagcagacagatgacggaattcttcttgagcgaaataagtacggaaatcacggtcccgctgttgtcgttccatggtgttgttgtagttattctgtataagaaaaaaaaaaagtactgattagcgaaaactccttatagatgagaaaaataagcaactcaccatggccttaaccaattctgcatccctcctctccttgatctcattaacatcctgcacaaacctggaataccaggttccagcgaggccagccatctctttcgcaaacttgctgccgccgccaatcgtctcctcaatgagcgaggcaatgctctccgctgagtccgggagcggtcccgtcacgtaaggatcagcattgttgatcagagtcatgtcacactggagggcgtgcaactgctggcgaaactggatgtcccggttattgctgaactgactcgtcaattcctggagccgctcctggagcgcagtgcgtcgcttgtcgcgttttgagggtgcgccgccagccccgccgccagggctgaggggcggagggttcgggtaagacattgtatgtggcgaaggtgggcgagaaagagtggtagatggcattaagttggtgaaggaagatgagatgggaggggtggatcacggttgaattgaacggcagaatgtttggccgccccggagaatagacagtgaggtaggagataagaagaggaaagggatttcgtactaacttaagagaagtatttggaaatataataggtaaatacaatggattcgtatatattatccgttttcccattttctattgttgtttgttctgatatgttcctattgatgttcctactaatgttcctcgcaattgatcacagctattgtaccttggatatctatcggtaactaagctagcgaatatccggcaggtaatactcgaaaatcaaagggactgactgtattcgacatatcgaaacctgcatactaccaatccatgggctgtatacggcgtgaagaccaggaatagagttcatcatcgccatacaaaagaccagtatccgcacctgggtagagcacctcaagttcatctttaacttctgtgcagtttcagttgagagccacatgtatctctccactcttcccgtattcgctaggccgcctccatatgtacctggagttttttcgtgttcatttccacagggatattgcccatacccgatctccatgtcatagtagctgacagtgtgatcagtgagatcatctctaggctccagatcagtctgtaagcctggtgaggcagtgagtgatgctcgggggccctactatatattaaatttagggctgagagcaccattgcttggatattaaactattttgaatctgtaaagatactgaattatataccacgctacttatgcgcccagaaaaacaaagtggaggtgggtgaatcttcatagggtctatagggtagactgttgtaactagtttagtagagacttaaacatgatcacagtatggctatctctgtattagactcgcgccgtgcaccccgctctggtcaatgttgctctaaagtgaggtattagtctcttttcccctcgaataccttgctctcattcgctaagaaatctgcactggcctgctaagtgatagagttcccctcttttaactcaaactttccgacgcactcagctgtatgtacgctgtcattctcgagccctggcactggccttaaccaatgatgctgcgtggtgatacctgaaggagattacgtgttgatctatcccccaaatggtgagtgtagtatacatgagctgagctccttcgagaaataatcaaataggcgcacgctagtgcacaagctatcacaaccctagagatattttcaagtcacagccaacggactttcagctgtatgctagaaagcccatcagtatgtgtggccgtggacagagccgcattttgagcctagttcgtaggtcaggagcccccttttggatcctgtcaagatataaatagggactgggttcccatgccgctttctctctaatccagtgcccctaagagcattttgtcttcggtggcttttatatcttcattggacatatcgccatacctccggcaggacttctacgcacaatggcgactctaattgtggggctagcaataaccgattcggggaaagcggcagccgccaaacccgttcaggatgtgtctaactggttgaggaagtggcggggactagtgccattttagggatggagcggcgccaaattgcatctggccacgctaaaccggaacgggggccgatgaggacgccaaacccgatcgaggggggcgtcggatccggcgccgtcggcacaaatggtagttgtccgcaatgaaagccatagaccaagttatgagatgagctatagttaccatgtaatttcggtgatgcctaatgggagcctaacgaaaccataagcatgatccctgcagatacggagtacaacatacatattccagtgatatcctagattacagaaaagaatgttgttaatagcagatatattcccactaaatcgtgtatatttatatccatcatcaagacaagaaaaaaaaaaaggtccaaaacgtcatataagacccgaatcgccaacaccggggtattcatagttcattcaaaatgttcacgcggggaaatggaacccccaaacgagtaatgcaaggtgcgaaaatattacttcgcaccggaaaatcgaaatccaacaccggggacacctccatgggtcccatgtcatcttttgtcaaggccgtgtgttaaaatatgctattggggaagaaggggtggtggaaatgaaaggggtgaggattcgaaggtggggattcgaaataggagtcgaggaaaaaggaggaaaagcgatctagcaatgctgcgatctaattcgttcgacgaatcacaaagacaccaagctcgataccatcacgaggctcgttgtcctcgttatagcgtcgtttgcggatgccgtcgcagatttcacttaggagcccggaaggtgtgacttctttattgcccatcatggagcaaccggagcttgtcctcttagatgcacggcggccgttttgccagtacagattgaggagttccttcatgcggggcttttcctggtggatgaaccattcggcccagagattgcggtcgaggtgggtgtctccgcggcctgcatcggtcacgtgaaaccgggaagatgaatcgttgtcgctcaatgattcacagagcgccacgatgttcgccttcatggtggcgaagtcgtccatctgggagacggatgagagcttgccgaggtagcggctcacgtctgcggacaactcattcaccaccacgagttggcggagaagggggtcgaggatggggcccaagtattgggacttgaaggttgatgcacctttcttggtcgggtacacgaagaggagggagccgccattcggtgatagctcactcagacgatcaacgaggaaagacggacgggtacggcaaaacaaatcacggtactcttgggcagaggttggagggagatagcgctcgaggactgagatgtgaacgctgcgaggggggacaatgggcatcggagcgtgggacatttgccgttggaggggtccactgtagtcatggtaagcacccacaactgccgcactggagaaaaccgtggcgttgaagtattcctcggcggcagtcggagaacgaggagtgctaggaggagagtgaggcagattcgaaaggctgaattgctccggtactgcgtgggtgacgttgatatagggtgattggccaggttgcaagtggttgtgaactgcctggaccatagaggtaaaaacactgtcggttttcggtactgacgctgcctgatcagatgtcctagggtatggaagagtctgggaaacgattttgacggcctcgccgcctgtcttgcaaagggcaagtgatgaagctggaaaagtcagtgaccggccctgcagtatgaatatgtaaaaaaaaacttaccagtcaagttgataccatgatccagccatgagccaatgtcctgctggcagtccatatcatcgtggggcccagggctgcctccagagctggaggatctcccatctgatgggctgctgaatgtgtccgaagcaccggtcgcggaggaattgtccacgctctggttatcgtccatcatagccatagacctcggatggtgggagtgcgcgtcaaacaacatcatctcggacttgggattccacgcaacgtggatatcctcttccggcggcgtggggggtaatatagcggggtattcctgataatgcgcgttccaagacggcgacggagccaaaggcctcggcccgcgagacacggtggttgaaagacgaagacgagagtcgaccgaccgagtgcgagaatccaaacggtacggcgaacctggtgaactaggcgaggaccgttgatcccacgatgggaagttcacggccacgctactcttggagagaaagcgagagaccggtgacggtcttgttcggagagacccctgtgaagctcgtcggcggatcctcccggggttgaaagtttcctgtatatctgagttctgggggaggtgtgctctggtgtcgagtttcactgttggtgggacatgcatggtgtgatcgtcaagtgtgggagtgccgggccagtactgtgcattgcatgagggtgtcatccagtctttgttatccgggcgcagatggcagcggtcatgaatcatgcgtcggatgatcgaaggatgaccaaaagatgatggccgggtccgagcgtgggagtggaagttggaggttgaggcactgaagagatcgacgttaatgagaggagggaggggaaatgattgagtcttgttaggaaaagaagggataaaagagaagaagaagaagaagaagaagcaaaagagggcgtgaatcgaatggaaatggacgggaagggaaaagtgggtaccgggtatagtatgggcgaacaggcactagaccaagtaccgggtaccgactggggcaagggctggggccagactcttcaggtcgggacagtctagaccgtccaagtcatggagtcatcagtttccacctttttacgttcgtttttttttgctgtaagggatattgaatttatatagatactattcaatacccttaatctaatagacgtaaattatcaaaaaatacaacgcccaatagcgagtatgcagcgtggaggacaagtataaaatatcgccagtctaggctttcgtcttggctccacggggctgacgatcattttcaggtggtgcaagtcgaggccagaatacctgaaaatcacaggatccgaatatacttgatactccagatgacactgcaaatgaattgctcattacccgagccagactcgagcagctctcttgcttcaacatatctcttccctaatgcggcttaagccttgggtttcacaagtcgccagtaccatagaacgcatgtggagcctgggcctggacgaggtactgaggactttgccagtgtacgcatacgatattccgcttccggtgagttgggcatcggcactcatttgccaacgcatatcacatacataaaggctatacacatataagcctaagtatatatatatagatctacgtctagcttctatatacgctagttcgcagcaagttcgcagttggaagaccctgaattcttaaccctggattcggggtggcaccatgacaggcaaccccatacatttcagattcagatccagtccagtccgatctggacgttgggaccgttttataatttccaccgtgcgccccgatctggttcacttccctgttcccatctccggcggactccactgtctcacctagagtgttgccactattaatttgaggtgtctgtccatctatgggtacgaattcgcaatttaagaatttggcatccgtggatgggacggcacatttcggtttaatatatataaggacacgtcagccgatattacttgcatatgatagaagcgcttgaaataagatgattaatattagattatcatatcactatgtgcactcgacatgatcaacaaatcacatcatcccggccatagagaccgatcgccgacgcattccatggaatatctccatcgccccgaggcgatggttacttcgattatccacggttccggtcccgattgcatcaccacagcggactccagatccgcgcagacccttgcatctcgagaatctggtctcggtcgcgtgcaacactggggagtgccatgtgtgagagatcggggaaattttcggatgccaatttccgatagccgataggctctctggacgtagattgcgaaggtccgtagatcctttctagaaccccgaatggttcaaccagcaaaaggccaacctggaaaacagccccggtctaaaaccaccgggctgagagtaagaggggaaaaaaaaaatgcatatggcagcagtcaccatagcccaacgaagctcctcatgaagttagcgaccggcgccgagactgagtcgcagtagtacagccggccagcggctgtctcatctcctgcgagcaattccgcagcgaagcgcggtatctctgctcctcgcgcgtcagccggacctgtttccgcgcgaaactagacggcttcagggggatggtggagcgactgccgtagataggcatgggggtcttgcccagcgacgggttcacccgagccgggttatcgagggtcgtgctgagctcgtagcactgccggacgagctgctgcacgccgtccgtcagacgggacgcgcgctcctcgatatccggccagaaagcatcgccccagaaggggtcttcgcagacggcggtctcgagggcgttcagccagcactggaagccggaacgcgtgcccgcgagctgcgaggcgaccgtgacgaagcggatcgtcggctccgagtgcagcacgtgctggacgatgcacgccggacagcgggctgtgaggtaccagtcgtgttcctcggtgaggatgcagttcagccaggcgaaggcgctgcgggcttcgccgcggaatgcgcgttcgggctcggcgcctttctggctggggagggtgcgggcggcgatgcgctcggcttggtggttgattaggaaaagagggacgaggagggtgtggatgatatcgcggtggagacggaaggtttcctgttcggcggcggtgcaggcgtggcgatggccggcgcagaaactcggtcgctccatgccgcattcttggcggcggagctgttcgcgcattactcggaaggcttcgttgcgctctagctcgacttgctcgtgtcgagagatgtggaacggggaggccattgtggatggggactccgtatatcggggaatatggttctagatgattggatatgatatattatagaatcatatcgggaattgataaggacaggtacaggccagggctgagttcaagtagttccatcagagaaaataattcagggccacgaccggatgcgggcctggatattatatggtctgccccccctttgcggaaacgtcattagccaactgtcccgtttttggggaggccaaatgaaaagcccagacgatcccaatggacgactccactagctgacgaacactgtgcgtacgacgacgatcattggcggacatctcggaatgaagtggaggagtggagattggagagtctggccggtcgcacatccaacagcggttggggatgttgactccgtatactcctatagatcgggagacgtaacgtccctcacatggctattacatgattccatcgatattgacgaatgcgtggtttcgttgcacgtcaaaaagaacctccttatctcgccatgaccgcgttctagcccgagtcaccgctaaaaaccgcccagtggggtaacgtggcagtctggaatttcaaaagacttccaggatcgcgttggcgttgtgactagtgatattcaaagttacatgcattaggggtccacgagacttatcatccctgatttctagcccgatctctgcccaagaagaatataaaaaataaataaatgcagtaatgtcgatcgatgaggcaagtattcaaggtcggactaggactatctttcctatgctagcaagagtggatataagggccaagtccaaaatagcagtgattgacagggtttacgatggggggatacctgtccaacatggtggtaccgaggacggagcacagtgatagtgatgataatgatggtctgtaaatagctatcataacatgtctcaaacctcaatatcgtggttatatatagtataggggagcgtaactatgtatggaactcggtagattccgggttaggggcaacattaggggactcttaattttaaatccttttgtactggagactgcatatctctaccaataactatctattatcagtacggagcacggaggactccgcctagattgactccatagtgagctactccagatatctccaattgcgtgggaattagggctcggccccaacagctatacaacataccctcgaacaatcacaacatggcacttgtactcgggtgtatacctttcgcacttcgtgtcaacgtctatatcacattgtacaccctcaagcttgtaaaacaaattaattggaatgccccgaacggggcctggaatgaagcacgctagttgaaattaatgtgataatttcgttgctacaggcccaaatcaaggaactgcctcctttatgtttcacctcgacttgccttaaaatggttggaggagcgcttttcccgtttgcacctgccttgttccttcgttgttggtagtgtcaatttgagctgaaagcctttccttctcttcactctttagccattgctattttatcgcgtcttgcactgttactcgaacagaattaatcatgttgtcctccctggcattttccgtgccattgctcctcgcgggcctccaggccaccaccgtcggcgccatctcccccatttcggcggtcggctccaagttcttctacgagaacggaacccagttctacatcaagggtacctgagaaccctgcactgtaggtatcctgtctgactgactcaaacaggcattgcttatcagcttaccccaagtgacccgcttgtcgatactgcccaatgcaagcgcgatatcgtccggatggccgagctgggcaccaatgctatccgtgtgtaccacgtggatgccagcgctgatcacaaaggctgtatgtcggcattggccgatgctggtaggtcgagtccacatgagcaatccccggtaaatcatactgatgcgttgtaggaatccacttgttcgtcgacttggacacctttactacccagattgaacaggtaactccacttctctttctcttatggaccatctgttaacgatcgcagaccgcacctcactggaacgaaacccagtttgatcacttcaaggccgtgctcgatgagttccaacagttcgacaacaccgccggtgtcttggtcggaaatgaggtcctcacgacggccgatggttcggcggctgcgccctacgtcttggcagctgctcgcgacgttaaggcctaccgtgataagaagggctatcgcgagattcctgttggttactccgcggccgatattgccgatctgcgacccatgctgcagaactacatggcctgttctaagaatgcgtccgagcgcttggacttttactcgctgaacgcctatgagtggtgtggctcgtccagctatgaacagtctggatacaatatgctgcagaagaacgccaccgattaccccatccctatcttcttctccgagaccggctgcaacaccccctcaccccgcacctttgaggatcaggctgccatcttcggcgataagatgtctgacacttggtccggatccatcatctacgagtggatcgaggagaccaacgactatggcttgatcagctatggcgcttctgtcgacccggcgaccgcaaccgcaagcaacatcgaggacggcttcacccgccagggaaccccaacacccgtgtcgcctgatttcaacaacctcaagtcgcagtgggcgactctgaacccgagcggtgttgccctttccgcctacaaaaagagcgcctccagcgccgccatcgagtgccctgcctcgacctcgggtggatgggccgttgacccaagctcgccgcttcctaccttgggacagacctacaagaagggatcttcatctgaatccacagcgaccggtaagactaccaaggccagtgcgaccacttcaagcggaacatcctcggcatcggcaacaaaggaaggcgctgctcactctgtgactgtcggctcgccagctactgagcgcctgctcgctggatccttggtgctgtctggtctgctgggagccgttgctttctggctttgatttgttctccgacctttgacgattgtggccaagccattgtattgatagcatcacatatttgggatagacaacggccgactgcatatgagtcgtgctgtgttgcatacaggttatgttaactcaagtctgtctttcacgaagcatgaagtgtacacaagaaataaattattagtgaataagaaccggtcattgaccatcaagacattatcatacatctccatcattctttaaacgacataccttctatcccagtaatgttcatctccaactctggcagatatagctcaggcatggcagaaacatcttccttcctatcaaaatcaacaaaatctccctcgaaattactttcactctcactctcactcccagcatgaccaaacccgaaatcaaattccgaaaccgattccgcaaccgaaacagatcccgactccaccggagccgaagacacaacagaagcactctcccccacttcccgaacaacctccaacttccgattattattcccctctttatgactctcgtccctatgagtctccctatgacccccctcctcccgtttctccttaacacaatgcaaaaccaacagcccatccccactcccaccccccttcttcgtaatcgcatccgcaaaacccttccgaaccctccccgccagcggcctcctcgcaccctcgagatcaagcatagcgcgcacaaccagcaacatccgcggcacagcccagaacgcgcgatcggagcgtcgatcccgccgacagcgtttcagcgcgtcgccctccagtcgcgaaatccacgactggatctgcacggcgttgcgctcgaggtggaatgaggcatctgctatcccgccgccgcgaccggcggagcggttgcgggcgctgcggtggccgctgaaggaggcgagggtgcgtttgtgtaggattgttaggatgtcgagggttgttgctgctagggagaagatgtcggctggggagttggggtttggggggtgggtgtggttgtggttgtgggaatgtgggagggatggcgtggatgtggagtggcggagggaggttggggatgttagggatgaggtgttggaggaggaggaggttgaggtggacattattgagggggtgttctttgttcggcgcgcccagaaggatgagatgcggtggcggggggttgcttgcggtgaggtggcggttgcgtctgtgtgggttgaggacgctgctgaggagacttcggaggaggatgaggaggaggagaaggcgaaggagaagcgggagggggagcctgagcggccgatgcggatggctgttccttttgaggaggaggagtttggtctggtgtggtttggagacgcggcgcggctttcgttcagtggggggagcgttagacgggttggtctttgtctgcgcttggtacgtcctcctgaggggaggagggttttggcgggctgcactggctttaggatcaccggggctgtgggacgggtccagcgctctggggcagagtagttgtatgcctcgaggtcgttgacatgtggcggggtcaggagggagtcgagtgcttggaactggccgaggcagatgtggtagtctgcgtcgacgaagatgttggatgggcggattgcgccgtgggcgtagccgcgggcgtgcagccagcagactgccgaggcaaggcaatgcggccaggtgattaggatctggcgacgttgttctttctctagccgtttgaaggccaggggctcgtcggtgaggaatcggtataggttccgatctgccgtggcgccggtgaaaaggacagagacgctgtcgtctttcagatatgaagcgtagacggagacgagatgctcgtgtgacagtctcttcaagctgcggatctcggcgagaacctcgtcagaggagaagaaatgcggtgcgccgccgacctgcacttgggttcgcatgtagactcgacagacagggccggcgagaactactctgtccactgtatcatcacgcccgtgtatcccgctgctggtgttggtgcggaccgcctcgacgggcacgccctcattctcggtatagacgacatgttctccctccgctataccacggactaagaatcgccactgcgcatgaaagaaactggtctcgagagcgacgtcgtctccatctggggaaaggtgtagtaaatcgacactatgctcggcgatgggtagatcatcgtcgtcgcacgactcgtcgacgagcgcgaagatgcgatcgggaataccaatagcgtcgaggatcataaaaacacggccggctttggtgaggatccattccatgtaggtctcgctggtcaagccctcgccccagtccgggagctcgaagagacgcgggatgttctccggccgcagacgactgatgatgtactttttgtcgagggtggatttgatgcgctcctcgggccaccatagtgaagtttcattctgagacatactggccctgcagaaagcgtttgccgatcaacataacggggagaccctgttaatataacggaccatgtcactctggacaaagcggctgtcaaagaacatgtttccacctcaaccgtagaaaggtgtccggaataaaggacggctactggtggagggcttatcttgcaaggagatgggcaatgtccgatcaatagccccggggcatcaaatggtgtctgttttagagttgacttttcaatgcaaagaccaaattattaaagacaatccatcgcactatgtaacttgttccatgtaaagccgtcgctcagccaatctagggccccaggcttatctttgcgcggttccaaggttaccataagataagcgatcatcgcatggcaactgtcatatgcgctgctatagatctattacggggggcaactgcggcttcgcaaggagagattcaataattgtcactgttcaggggaacctgatccataatatgcaccccggatgtatcccccctatgtatccgagcgatcattgcggagagctcgaatgtgatccattgatacacctaccgcgaggattacatcatatgtttctttcaggtcaggacctcctgcacggaatcagccatggaaattggtggcgttcgataataatgccattgacaagcgtagatagccatcttgccgtcaggaaccgaagtcagcacgagcccggcagccccgaccgtttggcgccccacaatctcattttgcacgtcgccctgacccggactgccgggaaggattggatcaacatggaccggggtattctggatgaggatgtaatcagcgtaggctagcgcggataactgcacgagggggagtctgatgaacgacgggtcgattcaggacttcagccgatcaccgaagatagtgggcatgccgtggagactgaaacacgttcctgaataggatggatagccccgttatttttgcaaatacagttgaggtctgaagagccgagaatgcttgcgtgtcgtgagctaggactctgtcagattggcgggcggtcccggatgtgattgatgatattgagaagtatcctagagctatttcggaggacaccgtgattgtacttaaggtctaatttcggcgttagaaatagaatatgtgacacaagtacggagtagttgttgatagacacctccctccagtgtgttgttacttgtgtgctcgtgacttgcatgaaggcggtgaagggggttgtcggcagaatcgtgtcttgaaaggagaacccaattaggaaagtgcaacctacgagcatccagacttgtgaatatcctacaaggacactaagtgtacccagaatgctttaatcttttgggtcttacgtttaccgatgtcaaacagaagccttgggctatctggacaactcaatgccacataatggtacatattaaggggactctatgacttgatatcttgaaatgagaaggtaggacaataggtaaatgcttgaatctactctttttgttactctcatagccttagtctctatgactgcaggactagctgtctgcaacgagagaacatcagagcagaatgtcgtaccttctttctttggcaaacacctgatcgctccttcccatttcgccatggacatctcgcccatcactctcagctgaactttcccctccttctctccttctctcctcatctcatctcatacttctcaccttctagggacatccacgggaatcaaagtcatccccattatgattgttgtcaccggtggtgccggctttgtcggttcaaacatcgtcaaggagctgaatagtcgtggcgtgaccaatatcgtggttgtcgatgacatgactgatggatccaagttccgcaacctggtcaactgcaaagtggccgactacatcgatgcaactgccttccgtgaagcgattcggaccaaagccttccatcatcgtccccgcgttattttccactatggtgaaaactcgtcaaataacggtagcaacggtaagaaaatgctggaggcaaacttcacctactccaaggaactcttccattggtgcaaggaccagggggtccgcttcatctacgcctcgtccgctgtcgtttatggaaataacaccaccttcgccgagggagacttccaggaagcccctctaaatgtatacggatactcaaagatgttattcgatcagtatgtcgtcaagaacactgacatccgctccccacaagtcgtgggactccgtctcttcagtgtttatggacccggagaacagtaccaaagttcaatccctagcactgtctttcagttttacgaaaaacgcaaatctttcaaggcaattgagctgttcggagaatacgccggggtcgaggctggccaacagaagcgtgatttcgtccacgtacaggacgtcgcgcgcctgaactgttggttccttgaccaccctgagatcagtggtatttacaatgtcggcactggtgtggccagcagcttccacgatgtcgccaccgaggtcgccagcaacttcggcaatccagagggctatatcaagttcatttccttcccagccgaattgaaaggcagatacccgagctacgcctgcgccgacatctcgaagctccgtcgggccggctccgtgctgcgtttccgcggcatcgaggaagggattcggaattacctggagtggcttgaaagtcctgaggggttgctccgctaatccttgcacccaacatgacactcgagtatcttcgggaggtcatttttttattctttgaggacactctattcttcgaaacggcacgcggccgtcatttgctcctgtttgtagaaatctcttcatatctgggtacgctaaatatatttattaacatcgcctgaggatttatttaacaagacaaaggaaaggatatgacccagaatgaaagaatgaaatattcaacctgttgagttcatacctggattgagctgtggaacaaagacaaactaggtagtcataccttccatagtggaacagagattttcaaaaaactactttgctagagaagaaaataaataaacaggacatctttcagaaaaaggcgatgtttatcgcgttcaattagggagtgaataaatagaatacaaagcagtccattaggacagatgatctaagtcaattcccagctaaagtcctgtccacccgaagcaggccgaaccactacagagccgggaagacaaataaggacgaaggaaaaacacaaaacactgtgtactgtgcatatttgtagtcacaagagacaaggaaagtaaaaccacgaggtcctcgcggtgtggtagtctgctgtcaaaacgcatctacatcatcaagccgaagaaagcagcgagagaagccaacagcaggctggaagcgaccgacacgctcgaagccgcgttgaagatcggagacgcgctgggcgagacgactccactggcgctgcgactggcgtacgcgtacccgctcgaagtagcccatgttgcggatgcgggcgcgggaacaacaccggtgtttgccggggaagtgccgctgggagcagccgggaccagaccgatggtcggcacagcaccggccgtagagccggtgtttgtgacgaagctgacctgcgggacggtgacggtgtaggtcgagtaggtgattgtggtgacggggagggcgggggcggaggtgatggggatgacgacgctggcgggggcagtcacagtggcgccggtgacaccggctgcggatgcggggacggacggagcaactgtcgggatcagggtgattgttgatgggatggcggttacgatgcctgggttctgggggacccaggtggcgcagataccggtgaagtaggagagggcggattggatctcggacttcgaggcaccccaggcttggatgcaggagatgactttgctggtgaactcgctgttggggcagaagcaggaggcgtcgctgttggatgtgcacttgggcgcgagcgagagccaggtgttgatgcactggggtacggtgttggggcagggagcggagggagcggggctcgatactggggacacgccgctggggactacggatgtagattgactctcggtggcagcggtggcggtagtcgcgatggttgcgacggaggtgagggtcactgtggaaactgtgctggatgtggtcacgaaggtggaggagcccgaggtgacggtgttggtcacggggcaggtggtctcggtcacataagtcacaacggtggtagtggcaccctcgggaatggtgggtgtggagttggcactggtgacagcgggagcagtggtggcagcgacacctgtctcagagggagccggggtgcttcccgcagcgacagagctggggaggttggaagtcgaggtcaaggtaacagttgaaaccgtgctggatgtggtgacaaaagtcgacgacccagaagtgacagtggcagtcacaggacaggtggtctcagttacataagttacaaccgtggcagtcgatccttggggaatagcaggtgttgtctcagcgctcacgccggtgggaaccaagctagtgacatcggagccggtggggaggggactggaggcctctgcagacgaagaagagacagggcttgatccctcggaagttccagatgggaccaggctcgaagctccaggtgtatcagatgaaccagtgctggaaacgacaatgatcgagacaccgggggtaccagacggggcaacagtgctctgaccagcaacggaggtggcggtagcggagcagtcggtgcagatcgtagagacactagtcatagtaacggttgaaatggtgcttgaggtagtcacgaaagtggagctaccagaggtaaccgtgttagtcaccgggcaagtagtcacagtctcccaagtaacgacagtagtagtggcctctccaggggcgaggggagtaccagcaggggacgagacagcggaggtcacgctgggagccgagggggttccggccgaagttccactggcgggaggtgatccagccgaggagctcacgggcgagacccctgttgggactgcagacagaggtgtggaaccgacttcagctgtggtagtctcggtgacgggacggacagtggttgaaacagggattgtcgaagtcaccactgtagtcgagtgtgctgggcagttggtaacagtcggagcacagctagtgatagtaaccaaactggtggtatacacggttgaggtagtcatctggaccggagtggtgatcaccggggttgaagcggctgaagttccaacaggggtctcgcccggagcggatgaaacagaagaggccggaatcgaagatgtagggacggatgtgccactgggaacaccaggaataccagccgatgagctgacaggggaaacaccgctcgggcttgggactgcggacagaggtgtggagccgacggcacctgtggtagtctcagtgacgggacagacagtggttgaaatagggattgtcgaagtcaccactgtagtcgagtctgctggacaattggtaacagtcggggcacagctagtgatagtaaccaaactggtggtatacacggtcgacgtagtcatctggactggggtggtgatcaccggggtcgaagtggcagaagttacatcaggggtctcgcctgcagtagaggaaatagcagaagaaggcaagatcgaagatccaggaacggatgtaccactagcaacgccaggaataccagccgatgagctgacgggggaaacaccgctcgggctagatacagcaggcacagagagcgagcttgtagcggtagcagtagtctcagtaacggggcagaccgtggtggaaagagcgatagttgaagttaccacaacggtagatccagctgggcaattggtgacagtcggagcacagctagtgatagtgatcaaactagtggtgaacacagtcgaggtagtcatctgaacaggtgtgctcactgccggagtggtgactggagacacagcagagcctggggtagagcctgggacagagagcgaaggcacagcggtagagctggtgacagcagagcctgggacagagcctgggacagagagcgaaggcacgacgatagaactggagacagaagtctgttcagatggaactctggtaatagcagaagtactggaaacgacaggcgcagtggttgtggaaccaggagtgcagtcgaagccaacgctgtagatgcccaaaccgcagctctcatgctcactatcgtcgggcagctcgaagtgaacggacgtagcaccaccacactggtcgttgctgaccacggtaccagcggagttgcaggaagcggtgttcttgcaagtcgatccatcgggcatgctgtagatgatgtgcaagtcggtatccttatcggtagcaacgtggaagttggtcacagagaagccgctctcatccgagccacaggagaacgacggagccgacgaggaggagctagaagagctagaggagccggagccactggagctgtgggagctggagccactggagccactggagctggaggagctagaggagctacctttggagacggtaccggagatacatttctgggtctatagcatggtcagtatgtgcagataaagagaggcatgcattactcacgccacgcttgccaaggctagaaccgaagccattgccgcaagtgaaacccgaaaaggaaaagccaccatagctggagaaagagccaggagcgagatcagtccagctgaagcccttttgctgggagtcgttacacttgttaggcgatctacccgggctagagtagcatttctcggagccccaggactaaagaatttcgagttaggatggatatcagagacgacaaatatcagttgaggcataccgctccggtggcctggccagaggccagaagggataaaaacacaatagcggatgtgaccttcatagtgggaggatatccgtaacgagtgaaagtgggacgcgaaagatcgaatggaaggaaaaaagaagagagaagacgtatgaaagaaacaaagatggactgatgtagactggataggctgcgatatagaaagctaggtctcaatagatatcgtgatataagccacaattgtataggcagcaaaccaggcaattcctattagtattgttgatgggtgacaataagaaaaaaaacctcaatgagattgggtcaatatcaaacgaaagaaagacaaggaaatgcgtatccctgaacgagcgtctttggttggagacgaaccaatatggataaagatccaaaagaaaatgaaacaatgacgagaatgaaagaagtcaaggatctgggcagggtcgcggtctttaaacaattgtccaaccaggccattccataaacttctgcaggcaaagggtctggctgcagctagcgagccttcctctgttgacccgaagtctggcgccaaggaccctggtaagacattttgtctgaaaaaaacccccatctctccaatcggcagaaatctggaggcacagatgaaactgtagtggctgaaaggagggtgggcttgggatccatccagagcttggcgccgattggtatagacgtgcagaagctggagaagagccagtcaggggtcgaccaaggcgcttgccggggggtccgatcccactcagcatcagttcatccagatgtgcctgtgagatcagtcgacattaattgaccaataagcatgacggagtaaaaataggttctgaataggcgcttgatcggcagggagaacttgcataggccgagcgttgacaggaggggtcttcagggtaaacagtccacgtgcacttggagtctttcatctcccccaaggctcttggactgaaactcgctattttcgactagttgaggttaaagatttagttcaaaatcaaataatgggagataagaaaaagaaagaacttggcgtctcgcccatgcacccactttctgcgtcactgcccacatatttgcttattattgatcttcatgatcttctgtatacaagctctttgcatctcgaagcgccagggtccacaaatcagagaatgtctatgcatatggagtattactggggtcagggactgctcgtgtcttaccggatcgacttttcttttcttttctatctcgggtcccaggggtaaacccctggaaggtcgaacggccaggtacccgaacgctccgtctcgcctttcgcttctcggtttatgtggatccgactaaaaaggcccagcgccaaacctgtcagaatatactagtggcgttgtttaaaccgaggggttcctgttcctgttcctgttcctgtttctaagcgtctcacttctgggctggatgtaaccgataccattcctatcatccgatctgaattcgaatacgtactattcaagataggtttaacttagccactacggagtacttcttcctgaactaactatatacctcggctttgaggggtataagtgtcgaattccctattgctttcaaccatgtcctaccgcattggccttctattttctctttaaatttcttgaaatggaaacagaaatgcaaatcgtccccgtctctcggcgcgtcggacgatgcctttgtctggcttaagtccgggtaacatgaaacgggcaactaaaaatacccacgaatgagacttttagcgccgcatggagaatgctacgccgtgcctccctcggaatcgtcggagtctagacgtcaagtctaggtcttaacattaatatattaacctcggggttactttgcaaattcggcaaccatgtgcgcccgggttgcatttttagtgatttcgtgcccaggcagtgtgcgttcaatgtcaaggcttatctggacatcctatttatgtctagctactccgtactcagtacggagtactccgcgtttaatcaggggcaagaaaaccgaaaaaccgacgactcggtactgtttgcagttatattcaactctacttgtcgttccatagatccctagcttcttactatcagcttattatcccgttggtggaacaacattgtaaatgtctgcggactactgagtagcgggtttcactagaaaaagtggcgtttacttccaggaccgaagccgtgttggagtatgtcgtacagatatattttgagtttagaagtagagcttctttagggtcgtttgtggcttccctaaatttagaaccaatactaagatagtagcgagattgaagattgggaaaccataatatcaacaactgtaaggttgttttatctttatcgacccattattccttcaaaattctcacgagccttctgccccaggatcttttctttgccttgtccggatcttcaatcacccagttgagcctatccgggaaattaatgtcatccaatgataccctaaaaaagttgaatgtaagtatcgagtcttgctttgatatgaagcaacgactgaccatttagtcttgaaccaccatttatatccaaaaaacatgaggaaaaataccggaatactaatatatgatgcgataaacaacgaatagttgaatggtgtctcaaataccgtgaaaccttggatcagcaataggaaaatattgaagaagaagttaccccagtagatcgaaatgtggcccggcgctgtatagggaaattctttggcgtcgatccctttcctcttcgcagcgccacgaactctcagatgaacaaatgtgatcgaagcccatgcgatgtaggccgcagttccaccgaaagaggtgaagtaggaaaacagactccctgccgttgtttgcaaggacatcaggcctaggaagccccacatatttgagaaaataattgccgggtatggcactgcacacaatattagttgttaccagagagaggatagaagaggaaattgtcttaccgcccctagtgtttgtgattgcaaagcacgagggagctttgcgtttcaacgcgagagagtaaagtgtgcgtgattggatgtagatcactccattcgcagcggaaatgaaggcaattataataatcgcattgacgaaatgcccggaagacttccacccagcaagtacaaaaccaatagtgaacggggatgatgccgttgtcgacgatggatgcaccagatcatccgatgttgacggacagatcaggccttggaaaaacgacatgccaacaaacacgaccaagatacgatagaggatagaattggtggcctaaacaaagtcagcatcagattcactttaaatgtcaccgatttaggggatgcacgcacacgaggaacgtctcgttgggggttcttggactcccccgcggcaacagaaacaatctcagttccaacatagtatgcggcggccagaacaaatacttgaccaaatccattgattccatttcggattgggcctggcagaatgtcagacctgcgaatcaattcgtgtgcgagaatactcaccgtatggctctttccagtacctgaatccgacatacccattaccaaacgcaccagtatcggcaagaatggagataaaaaatagcacaatgagtgacaggaacttaaacatgccaaagtagtattcagtctccccgtagaagttcaccccaagggtggttagaatggagaaaaagacaaagaataagatgtaccaagcccagacggggatcgtggtatcgggaatccagaattgaaggaagactgtggcattattccaatctttgaagttgatgagtgcaggccatttcttgcttgttgatgacactcacctgatgcaagaaatacactccacataaaatagtaaagccaagatactgcaaagctgagggctggatctacgaatcgatcacagtgctatatgaaacaggttagcaaaatttccagcaggttgagattggagttacttacttctacaaacccgccgtgaacaggaaagagcgtggcaacctctccaacactctgcatcaaaatccacatcgaagcacctgggccatgtcaactttgtgagaaatatgctttgcaatgctaccaactcacccacaacagaaaatccaatcaggagacccaatggaccagcttcgtaaatcccatagcccaagccataaaagcaacccggtccaatgatactccctagggcaattatcacaaattgacggcccttaagcccccggcgtaggccatcctcgatgatgtcgccagaaatgtcacgatggggttcatcgctttcttgaacttcggtgacagacggctttttcgatgtatcggcttttgtctgcggtaatgagaagtctgccattttgaaagacagccctagagtgattgatcgtgcaaaagaccgaggactgaccagggggtctgttttatagccttggaatcctccacatttattgattggagcttgaactgagcatttcggctaactcgtttagattgcttgaaccaaatgctaagctaaagctaataattgcttgtcgtggccaaatattctaccagtgagatgtttacttatatatcacgccattgaggagtacaattcgtagatatatttcggactatattccggcagataacaacagtgtaatttcacttccaagttcctcgacttcgaaaacaacagaccaactggggaacttttcacgagaaattgaactagaaaatcgaataagcaacaagcagggaggaatttggtatatcgaaaaattttcagttgccaaaagcgcctgttgtgtgaacgcgtagcgtcatcgaacatgagaatgacgggactttcaacgcgatgcaggcttgtggagcgttttgattttcattttcggagaattgtcctcatctatctcgagtttcatctattccaacatctcagcgcacagaatatgaagttttcatcgtcgagtgatcatgcaagtaacctcccaaccttagttggaggtagcaaggagagtttcacgcaacccggtacaccattttgattccagtgggcaatcccatgtcgaagccaaccggcatatgttccgggcacaatatccgacccgggattatcccgccacagcgagccgagagtgaccttgttgacgcgcaagatgaggccatgagccagcttgaacccatagctgcgcgacaaacaagcctcaacaatctcacgagccttctgttgctcgccagactcttgttccccctcttttggcatggatagcgacaacagatcgaatgcctcctggccgttccaagcagttaactcgttgatgagctgcgacccttccatgaactcgatcgcatagaaatgtgccacgcagtaggcagggccattccagtcatcttcggcatcaaccaatcccattaccgcactcgccacttgaccttgaatgatatagtcggtcaacaggcggctgacctcggtggggccaatgaaagtcccatcctcttcagtgatcgtaaactcgccgcccatgagaggaactccttggagtagcgggctagcgtacattccatccgtgctcgtcttgcccccatccgcggcccagagagcgaggagtagacgatggcagcgcgcaaaaagcgcattgttgggcaatgcggcgaggaaataattacatagactgtaatgatcctcgccactgggggtataagatagcacttcatacggggaatcggggttcgcgattgtcttgtgccagagcgtatccagatctccaatttgcatcatacccacgtccgcgtagacacctccatatcgcaacagcaacggccagcaaacaaggtctgaagtatgttgtagtgcgtaagggccagtgagagtctcgtcggcaaaggcgcgtgggaaaagtgttggatcggtaacatccaggaactcgacgatgttgctttttgaaccgggttgtcggtcaacgatccgtattgtccatccttgctttgtgaatcggcggtgccatgcgcgtacattgcgctgtgtgtaagggtgcatgttgatgtagcccgagtgccagaagaaccatatatttttgacgctggttagcggctggggatgcaacaggtcaaagtctatatcggcgtcggagcgtagatcgagaagcccagcggggatagcgtgcatcccggacggaataagatgttccattggagaaaagaaggtagaattagaagttgaggttgtgtttagtgcgagcatgccacaattattgattgacagtgtgctgtcttttatagatccgaaagttcccacagaaggatatcagccaatcacaacgaaatgatccgatgtgagcaatgatgagtcaagccctcgggactcccgaggtcccctatatccactgaagaactttctgggctcctgaggtctggttgtagaaattcccgtctggggatttgtctgtccacctgcctggacatacctattgtttggctgtacaaacttattgtgaaaaactccgctttcgattgcacacttcgacaaaagctataattcttcattctccgaggccgcacatcaatcagggcaaggaatgataagtcaacaaaaacgggaagaaagtatgcgcatggtagctgaggctacggagaacatgagtctcatgaatcacggctggtgcttgagctgcaagcgctgagggttggcgtggcagtgtcagtaatgtcgagatagtggtcggggtcgaaatcaaggatttttggtaatattacgcacgtcaagtgtttatatctataacccaaggtagggtttcataaaacttgcggaccttggtagatatcgcttgaataaggtttaggtgggtccggggttgtgggttctacatcatgaaggtcggagcttcatgagaggacggagacctattgattaatgagggccagcgagagaatatgataaaatatttcgaatgtttttgatattggtaaagataaatgtaaacagcaactcaaacagccataactcgttagagcgcaaacccacaagtttttaactccaaaggtatcaccagccccccccacaggggggggggaaaaannnnnnnnnnnnnnnnnnnnnnnnnnnnnnnnnnnnnnnnnnnnnnnnnnnnnnnnnnnnnnnnnnnnnnnnnnnnnnnnnnnnnnnnnnnnnnnnnnnnnnnnnnnnnnnnnnnnnnnnnnnnnnnnnnnnnnnnnnnnnnnnnnnnnnnnnnnnnnnnnnnnnnnnnnnnnnnnnnnnnnnnnnnnnnnnnnnnnnnnnnnnnnnnnnnnnnnnnnnnnnnnnnnnnnnnnnnnnnnnnnnnnnnnnnnnnnnnnnnnnnnnnnnnnnnnnnnnnnnnnnnnnnnnnnnnnnnnnnnnnnnnnnnnnnnnnnnnnnnnnnnnnnnnnnnnnnnnnnnnnnnnnnnnnnnnnnnnnnnnnnnnnnnnnnnnnnnnnnnnnnnnnnnnnnnnnnnnnnnnnnnnnnnnnnnnnnnnnnnnnnnnnnnncaccagcccccgcaacaggcgggggagaaaaatggccagtcaatagatatgacatatgaaatgaaaaaaggaaatgaaagattggtcagataatcaaatatcaaaatggatcgcttttgggttctgagaaccaacatcgatctttcgcaagccaactcaatatgcatggcaaatcgaactcaatcattagaaaggtagactggtctcaacgacacgtcagtggcaatatgcaatacaaccagagcgaagaacatgtgtgctcaacgcgaggtcaagagggtgaaggcacaagacactaatagtcgagtctgccaagcgactagaaacaggtaggataaattgtggccgtggttatcatatgatccttggaaatccaagagtcgtgcaatcgtgatacctcagagaggcgcggggatggggagctgagagcgacgttgctgagcatccatcagcttgcgtcgcacagcctcaccacctgcaatgctgctcgatttgcgcttgcgggtgggagttcgctggtcgttgttcttggcgtgccggaagacactggcaggacgagcgggagagtttgcgggcatgaactcgcggtgctggggaaggcggaggagcgcctggtagcggttatggttgcgacggaaggcagtaacaatacccttgtcgagatgattgaggaagcgctcttcgctattggcgggttgcgacgcagactggcgggtgggagtaggtgtacccatggacttgccgaaaggaggggccattggggacatgatatcgtcatcaaattgcttatccatgtcctcatcttcatcggaggatccattaccaaagtcgatgaagtcgtcgacgttgagagcagactcggggtcatcttcttcatcttcttcgaacgaactgtcgatggtgaagtcctgagaagggtagaatgcctcagggggacccatgacctggcctcccggggtgagatcgttgccgagagcggtcatcatgaggttggcactcgaagccagcattgggctgaaatccatctgattgggcgaggcgagtgcatcggtgtcgctctcatcaaccaagtgaagtgtagtctggcgagggctagtgttcgcagttccgggcatgctggtggcggcggattccagccagtcgtgacgagacgaggcatacgcggggataatcacgagatgcttgccagtgcaatcgaccaaagctactggcttgtgggggtctgcgacgaaggttcccatgatgggcccgcggcggcggggaatacattcactcttctcgtccacaggagccaaagagtcagaggagtcccggcggagaagggatcgagggtgggtgatggttgctggcggagggagatcttcgtctgtagtgtcaccatcatcgccttttcaaaggggttagcaaaagcaaaacacaatacgaatgaccgattatcatactctcgtaaccactcaagctggcctcggaggatccgtcggactcgacatggtagatgcttccatggccataatcggcgtcgccaaacatctcttccgattgccggcgggtatttctctggtagttttcattgtcgttttcgatcatacgacgcaattgtgggtccaggctgtcctgctgcaagaagtcgccgggtatatcgtcgtcactgtgggaatcactatcggaggacgaatcggatcgctcctcgaagtgaactcgccgggtgactggcgtctcaacggcttcactggtcacctcaggctctccaaaggtgtccatggcactgtagaggtgctcttcatcgaagaatgaagcagcaggtaggaacatgtggtcgtcgaacgagttgatagcccacccatcatcgtcaaatccagagctgggcaaaggccggttggttttctcagactccacaataatcatttcttccaacttctcgacgtcttggtcttcatcttcggcatctgtgatgtagtctacaccggcatagacatcatctgagctatcatccgagtcattggcgtcaatgtcatcattgccatcactgctgtcgctgctatcatcgtccaggacgcgtcttctcttgttgactgcgggttggcgccccgccttattgtcgcgacgacgaccataagacggggcccggactgctggttcttgttcatcgtctgcatcttcttctgaatcatctgcctcatcgctcaggtcctcgagggacgagaccgaagagacactcgagaccgatgatgatgaagctctccgtttcctatcggatggctgagcattggctacctttcgctgattggccttcggcgacgaatcgagattccgcatgatattggacttgggggttgaggggcgggggtgagagttcttggcggagctcttgggagcccgcttggaggagtatgagctctgcggcattttgtaatagacacgtatgaatggagaggggttgttttgttcttgtggacttgtatggtccttgttttttgttgttcaaatggtccggtccgtttcaggaggatccagtgataggatgaaggaagagggggtagatcttccttagttgagaggattgttgtagtttattccagaagagtaatccgtgcagggataagtcgaagagagattcgaagggaggtgggacggagtggaggagatcggagcggagtggagggggaggagtccacgggggggggtttcttttttcgtagccactaaagcacccgcagtccgttgcggacgctgtagtgctccttctgggagtttgctgaggggcaattccaacgccttcacacgaggcgtcgaaagagtaacaaatatcgtcaagtagaattgaagatcggagctgcaggactggggagccggcagggacaggctccccagcgaggcatttacagctcaacgaaggccatttggctgattcttgacgatatgtggtggatatgtagtaagtgtattaagatggggttcaataagttcaggagagtccgaagtagatcagttgcgagtgctatgggaaagggaagaagaagagcaggtcatttttttcccccaagtgggagacacttgtgattggctgcagaatacgaccgcctattcgttggcgccgctcaccgactctttcgcgccaatcagcgaccgccgaaagttgcaacgggaaagtcatgaatttgatctccaccaggccatttacttaaaattagatggttgcattgacattatattgggcattgggccctattgctactgatgttgtgcagtactggcatctcttcgatccactgctatctggggccttggaggaacatatcccggcaggtcgagtccaaacaaaacaaacctaacacgtcattcaacctcctcggcattctccccggaaaaatcccatggcgaaccatcccagtcaacgcaaaatacaaacccatacaggttgactcgagtttcgactcggcactggcagaaacggcatatcagaatcctagtctgcacggtcatcaaactagaatagccacggtgcaacgattgacccgtgcggtatggcgtgcatgatgattcatcctcggaccaggagacttttcatcgatgacacatctcgcgatgaatcatattgtttcgtatttggacttcacgatgacccgaattttcactgtgaggccacgggctaattggttcgaaccagagatccggccacttttacgttttgagtggcaaagcgctctactcttttccgacccgcttggccattttgcccgtcttccaagccgggaacctgcaggcctttttctttttttcttttcgcccaaaggtctaaatgcctaactggcctaaagatgatcagaggcggtaaaaggacagcatggccgaggctgggcgcgtctaacatgcatgagataggtccattgctctcttatctttgtcggtgaggggtcaattgtatagcccattacagttgtaacgtacacaatgcatgttctaccataacattgcggatataaaagaagtttcagatattttatatagaaaagtaaagaccatatttatgaaagagatatatatagaaacatcaacgttctaccacttggagaatactcaatatttcatcctaatatattaatagtaaataaaatagacctcctttagactatatatcccctactatatcttttgtaagtattcctacaagtgacaaaatctctatttcatgtttatgtaccttttgtatgggcataccatataaaagatacctaaaaagagaaatctctcgtttggtgagaaactctcgttatgtgggacagacccatacctggtacaggtatgggggcggtaagacggctatcttgtaatatcgatcgtcttcgcgactgctaagcccttatatttctccgtgagatatcgcccgatcaagtggtggtcgaataatttcgattataacgaagataaactcggctagccactagtacaatgctcatgaaaccttttcttctgctagaggcgctcgtcttacgggtggtcagcgggcatctgatcatgatgtcgcctgagccctacagcaacaaaaccctcaacaactctcctcttgccaacaacgggagtgattttccctgcaaattacgagatgatgcatttgcggcccctgcgaaagagactgtttacgaggttcatgggaagtgcaatccacgggggcggatcatgccagttgagcctcactgaagacctcgcgccatccaaagaaagcatatggaaggtcatcaagtcttatgaaggcggctgtcctgcaaatgtagaaggaggtctaagcggagacgccaatgctgacaatggcattcaactcgatttcgcgatacctgaagatatccactccgggaagtatactttggcctggatatggttcaatcatattggagatcgtgagatgtatatgaactgtgcactaattaccgtcgacagtccttcattgcctgtgttcaaccagagcatatagaaccaagcgcaggattatctacctatgttcatcgccaatataaatggctgtatgactccacaaaatttggatatccgattccctcagcctgggaagaatgttgaactcaatggtctggcgcgtaatattcttcctgacggtcaactagtatgcaccggaactcctgaatttggtgactcagtagccatggacccgattgttctagatcttgaaaagggtaatcattggaaggctattttatactccccgccacttctctagttagcattcagccgttaccttgctcctgtcgtgcttcccgccgtaatacaagccatcaatgatacctatctttggcattcgcggcacaattaaactggacaagtggtttaatatgaaggtcattgattgagcaaagcattggggattgaaatatgcatgaaaatttgataaatcattgaaaaggtcttcgccatactttggagttttaaattctcgagttcggtactgtactctgttgtattacgactgctttttggcaatggtaattcattgataacaagtatcataaaaggatgcaacaaaatttgtagaataacccagccacaaacgagttaatcgcacagacaatgccactctgcaaaaattgggatgaagatagaagagccgccgtacttacagtggatttcgaaaacagattttcctccagacatacacgtttaatatccagagactcactttggcccctagtccgagtcgtccgggctctagattgtcccgtagccaatagtaagacgtgattcccacgggaaggggctttatatagccagaataatcctaacgcaagatttgtaagggacttggaaagaaagcgtgtgtgtccggggggtaatctattttcgagattctctgtacatcaataggtcaagattggtttgatattgatagccatttgctgactagaacagacggaatccgtcagaataaaagtctaatttccgaagcttcgaaagagtgccaaatgctcctcgaaaggttttgcacgtaaaagcaacgtgtacagtacctggacttgaatgtacacgataactcgatgattggatgaacgtctgttattgaacttgtcttgcgactaattctttatacttaatttccaccagagtaacttctcaattgtcgtggcgtacaatttacacattcagactcctgtgtacactagggacgggactcagagctgaactttgacgtcaattgtttgaaatttgataccctcaagttttgaatagaaaccgaaaatgaaccggaaaattttctaacatttgtgttatgattgcaatgtaagcagcttgccgctagagaaatcgaaagaaaagttgtccaattacgataggcatcgccatccttactgagcaaccagacatgctgctcatctttttgtattcaaaaagctgcctatcatcgacgggctggatgggtcgcattggagaatgatgttcttatatacgatgagaatgagtttcgattcggtgatacacgattttgttcgtcaagttgataagcgatttcaactcttctggacttggcctttgctgaaaaggggttgtctgggacatcagccttgatacattgaagaggagggggccaatcacctgcaggatctctctcaaagggcgttttctaagctgatcaggcagattttcaatctcgacaggccacttatgcgtcgaatgacatttacccatcagcttgattacaatatccgctaaagcgtacagcttcattgtcgcagcatccatttcccaagcacttatctcgcagctgtcctcgatacccactggtgaatggaacggttagtaagaagtctgaaaactggggttaatttgatatgcgtacctatcttgaccttgccagactgagtgaaaaagatggtattcattgtcaaagtggccagcaccctcccgcattcagccaggtgctgaattccttcgagtatctgttcataatcagcgatcgctcgtattatgatataatatgtaactctacttactggcttgacaattgtaatgatctcactcgccgtgatcacgagcttcgttgccagaatctgggtgacggaaacttctacatgctcctaggccaaaaacaccgaatcatcatgataacagcatccaagtaatgaccggaaaatggggtgagagatgcgattcagcgttcgttgcaatccaaggtcggagaatgcttgcagctccagtttctgcacttggacaaagtctgcctttgtcttccttgtatcgagccagcacatacaatttgatatttgcaatgggttcaagtatgctccatggatcttcatgcaaggctcccgaactcgagcgatatttctcgttatcaagcgttgccgtcttctctttggttctcaacgacttcgggaaagcttgatccactgtagatgtctcggagactgaatcagcttgaaggggcggtgctttactgacctatatggtaggaggtctgcgattatgcttgctggcgctcatacttctaggcgtgcacttccaataagataaacttagaacgtcaggtcatctgggtgaatagaaactcctatcgatgagggaactgagcttcttatatacaagagcaggtacaaagacttgacgttagtcttcatttatcaaccccatctccgccgtaagtcttttgcgtaaagtttttgaggcagcatgcgcgattcaaccttaacgtcaatttgacctcaacacaaagttcatttcagcaaagagctttaacatcaacacctggacctaggtcgctagtcatgtcacactttttttcactaaaagtcagctttgcgtaaataggtgagaaggtttgtactgcgttgacagcgtgatctcaacccgtggttcatcgactcataaatgacgaatcatattcttggtcgttcatactgtatcttcaattgtactttcactgtagcaatctcaaagctcaattagtcctggctttacccatccgtacttctgcgacccaattacagcaaatcttcatcaatgagcgaaaactggtagcaagagtagcagatatcgaatgccttgggtccctgactgctggcgactgggcgaacaactgtgtaagtcatattctcttgcttcgccttttcgaaagccccacctacctccttctcatagcaacgatgggtcttaagtagaaattactggtatggtttaagcacagtccaataaaaatagtagattcgaaagatggacatttttcgtgtcattcactgatcaggccagcggaatttggagtacagtgccaccagacttcccaacacatagcaagccgtccctgcgataggcataactatccacggtcgcttatccccagttttgttcctaggaagttcattcatcatgaggaatgaactaagcaggaaagcgggaattcccatatggctatgtgtgaataagacaactgactcctaggatacgcctacgttgccctttcgtgtatcttttcgttgctacctttgcgtcatcagcccaatctttggtcaatctctgatgacacagcctatgctttccacaagatataaggctcagctttacccttgctttacgttctaacattttcactcacaagaaaggcacctcgtcaatttgaacatgacagaccagaaatcccgatggcacgcgcaaatgtcctctctcagactacaaatagctttggggcattcgctctccgactcagaagagaaaacaacgccagtatctggcccaccaaagaaggggttgctggcatccgctttggatcctgacacatttattgaaaatggaaacacgggaagatctcttgcacactcgccggatgtaagtttcgcctaatgcaaagggctgtggatggggactgacagtatcatgcgattaggctatatctttaacctcccgtgattctctatccgggtgtacagaagaggctagaattgctgtggcgcttacaaatcttctggttcttctactttagcagtggcgacgtactcatttcagtagacgcgtacggatactatggaatttgcacggttttcagaagggtagctttggaactacaaaggagaataatgacgtggcttagtggtactttgtggtacttcatatgattatagatcgacggaagcattgtattccgtcaggctggctggggaaattgaagattttattagtgtgaataatcaggcacattgaacttccctttccattgccaaggttccatgagctctatcttcctcccacacactttttctttctacaaaccacactgcaatgcgatccactcttcagtatcaaaatttgaggaggagtagttgtggcactcatcccatgtcgtgtaagcatcttcgtacccattattgtcacaagtattagtgttgtaagcggtgcagattgcaccattaggaccagtgattcgccacgacagaggcttggtcagggttcccttatcacatgaggtattagagaaacccccatcggtgtaccatccgcaagaaacatcagtgtctgacgaagttgtggttaagtcgttaatgaccaagcacgtgttctgggtggtgtcttcgttgtaacctgaaactacataatagtcaccactacagtctttctcactgtaaatggcgatagaccacgattcggttggagtaggagcggcagtggtagttgatgtcgcttttctcgtggtagatgtcgcaagtcctgcccatgatgaccagctggagagatagtcatccggatagtcagtctgaacaggccaggaagtcacagttgctatggcggcacttcctgcggctccatccgggtcagtaccgagagcgcaagtacccatagaggcggtccacgatgcgtcatccattgctgtttggttcaaaatctcgccagtgccgttggcataataatcaaagtaaccggggaccaaatatcttttaacatcaagtggtggcggaggcgccaggggaagatgtggatagatatcgccaagcttgttttggatgaacttggccaaggcaaatagagccatgctgtccgcattttggatcgtccaatccgcgaattgggtttgcacacgcgcaagacccttattcaagtacggtgcgtatgccgtgacccattttgaacccgtgtcgtaattgtacttcatcttgatatccgtgacatgagtatttggaccccaaccgtttgctaaggcaacccaatcaatgtgtagaagctcatgcatccacgtggtagcctgattcccattgtagttgttcatatcagcatagatcgccggtgtgaaaccagggtttgcgctttcaagtacggttttgagagtgggttgaccgaagtatggtgggcagaaattgatagcaggggcagaaggctcgtcttgatcactgttgactgtgtatgccacggtttgggtatcacggccgcatgaacaagccaggtggggatcatcacagcgagccacaattctccagtcccatggcattcctatccacccaggctgaattgtggcaagattcacgtagatatttttgaatctttcccgcaggtgctggttcatagctggtgcgcccagatactcgacggtagctgcctcgttccagtttattttgtcatcatatgcttcgctcatcatgtagttcataatctcccaggattgttgccaccctgagtagatttccttcttctgaagtgggtcacaaccatgccagccaacaagcttggaggcgagtagagtgagattataggtctcaaagttagatgtattgtatccgcttaggctcagagcagccgtaaacgcgtcctccgcggcggtgatgttggaagttgcatcggcttcagcagcagttaggacaaaattagtcaagtccaatgcccactccaccgttccgagaaacccataagaagcatagcggttgatgcgagagctcttagtgctatccttcacacgtccgagccacaggtgatacgccgagtagctgccaatattattggacgccatcaagacccctagggtcgagccggagattagatactaaaggatctaaggcctcaatatgaaatagatcatatgaaatcactacattcttgactaaaaaatcaacagtagttaggtaatatgtctttgatagaagacacccgcggcagcatacactctgaccgaaaatcaaacaaccacccgtcaaggaaggtcaagaaaagggcaatatttcgggttggcgtagaaagttcctcctagcctttcaatcactaagcaacgctcctccatggtacgggcattttgtagcattgctccacctttcttactagcgccctcttttgttgtcttccaaacccacgccccaccatccgaagtccaaccgacccgaacataattgttagacctttcatcaagcatgccggacattccactttcaagccatgctaattcggttggccaccaagtcgggctaagatatcgcactattaggagttagaaatatatagcgtcctaataaaggtattgtttgatgtaacttactacgatcgcaatgtgcattctccttttgttgccagttgggatcggaatttgttggacgccttgtattgttgaatgggtccaattccaggaactctatctccactcggctagagacatcaagcgtatagattccgccttgggagggccatcctttgacagtcacgccaggaccagacgaataatatatccagaactgcggctctcctagaaaccgatcctgaggggtagtccattcgctgctcacttcttggagcagttcctggagcgcgtcctggggcattgtgagtggaatttgaggggcggaaccctccggcttaatttgatagcctagccagccagctgtaactgatatgagcagtgggatcacagcccaccagttcaacatttcccagttttagagagagataagtcagaagggacaatatcagggttctgggatatagatagacgtgtgccctcattaaagaagaaacataaagtttaggcagagatgattgcagcttctcagtgattcaagcaggcaaccgataagtcagcaggtttcgctaagataactctaccgttttgcaggtcgttatgttgaggagatgcggtgttcaatgaaacgtgcgatacagaactccgtgcgtgccggtctcgtattttgttcattactcttggcattgtccggtgtttcaatgtgaaggaccctaagtggggggcgaggctgcagacctcgagagtgaagtggcaaaagatttcctcaccaaaaaaaaaaaaaaaaagggtctcgttaccggagacaagccattctgtctaaactcaatatcaagtagggtttgtccagctcggtggtgaattacgttatagattaacgtggggtagttagtactccgtcaataagttagcgagacaccctaacatacatacaacattcaccctcgaaatgtgtttgattgacataatatgtgacaaaataccatttgcaatcacagaagctgaagcgatctgctagattatataagtcatcggacccccagccgcatcactcatcaccaacagcaccagttcgcataaaaacacccatcagcaatcataggcacaaggccaaagcgatacaaaatgactcggaaccactctatgacttccaatagaggtagcaaagaatacaccagcgtctgcacattttttgtgcagttcctccagtttgcgcatagtctccagggaactctgctgaacctctgaaggaccgtaaccttcaagccccaaggaagtaaggcgtggcagacaatttgactctatcaagcggtcgatttgatcgacggcccacccaagtagctcgttgtggcagtggcacagatacaaagtctcaagggacggcggcaaaatcgccatgagttcttgcgtgggctcaaagtcctcatcaagcttagcaagcattgatatagaaatatgtagatatttcaacatgttgaaatcggcaaacgatcccatccatccctcatcgtcttctgggggttcgtatgattcgccacagagccaaaagccttcaagtgttgtcttgtgaagggagatagattcttgaaggggagccgatacaatctcaggcccatcggagatcattcctccgccaatattcaagcgaaacgtcttgagagccttgcaagattcaatccagacacggaagccacactcagtgttggtcatgtcgagatcaatatcggtgacgtctgagaagggaataatgcgggtttcttcctcttcgcgagcgttgtcgacgatagcgtgtcctccaaccctgcgcatggcggggaatttgaagaacggatccatgaggcttgcatggatggaattttccgtatcataccattccccgaaagcttcaacgaggcgagaaaatgccgtggtatcctctcgtgcagccttcacgaacatccccgtaacatattctgacatatccgggtagcatatgctgattcgtctcaagcctttcagctggggaaggagcaaagccaaccaagcgtcggtgtttccgagacgcagttgttcatgcggttgcttagaccaacaggtaccagcgacaaatccgtcaaggagttccctatcatattcataatcaacgtcgacttcttcattggcgtcctcagtgtcccagtaccctagccgtatagatcgtactgcatttgccagctgcggacgtcgcgcaattgcattgacaagtcgactggcttggccaatagtatgatgggtacaattaccaagaataacccgagagtagagcgctggtagcagaactgtgtacagtcgacgacatgatcgaatcagggaacagcggtcaccctggaaaggcagttcttccgcaatgaggcaaagagcctcctctgggaggtcgagaagcatgaccatgatgtaagtagaaggtttcttgagaaagaaaagagatggtagttgggttcaggttcggcgaggaggttgctgtgtagaatcacgaggtgggggcgataattgtctacagcacttggtaggagacccaaccacggccatagtactccgcatatatactcggtattaagagaatatgagtgttggtgtggtcaccaacacagtgagcgctaagaaaggtgatgcgggatgtttgacagaagaggcaacaagtggagactgccaagagcaactatcaaaagaaagcgcttagctgagcggttcagtgcatgaaatgcgaggtgtatgctcagtgagaccgaatgatattgattaaattaaaataataaaaaatcaacggaataacccgcgaggaggtctcatttagcaatccctggattttgggtcgcccactcaaatccaagattccttggttggtgggatcaacaaccatggttccgatcaacactaaccttagccctagagttggacaaagctcacaaaaggggagatcaagtgccgggataaggagtaacattactaggcatacgctctgttttggcccgaccaaacatagacagacgtgatttcgaccgggttggaactgctggccgcgtactttgttgagtatcttgttgggtttcgctctccacttccgcgggaacagcggattcgacaggagcggcgcgggcctcctctacctttatcacgcctttgcgtatctcatcggacgaagcgcccggtggtgcggtcgtcgtcaacgtctcagtagggcggattagaccctcggaagtatcttggttgagcttgatgatctcttcctccgtcaccagacgctcattctccaaacggacctcgcgcccgcgtttatggcagtaccacagcacaaagaggaggactggagaatgttagtcagccaaaatactattgcacttggtgtgatgcttcacttactgaacaatgctaaagaccagagcacattcatgcccataaccgccgggaaccgagctcgcagaaacgccatgatggatcgcagcatgcctacgagagcagcgggtttcgacacaagttcttttagacttggcactcccattttttctgcaaccgcagcagccttgcccacgttctccacattgattccactcttaacggcacggtcggcagcaaccgccagcatctctggagccaaggtttcagtccaacgctcaggaagtttctcgatcaatttttgcatgggactaggcagcttcgtataggtgtcttgtagttggcgattgccgttcgtcagcagcatctccaagtcgtgataggcagttgggactccattgatcagatccttgaagatgagcttgaacttgcgtaaaagctcctgtgtctcctcactgatcgaaaacacacggttgttatccgctgccagattcaatcgctccaaaatatctgtcacgtcgtcggcgtcgttatctttttctgcgttcttcccgtttgttgacttatccgatgtggtcggaggagtcccggcttcggtctgtgatttgttcgcatcgtcggtgtctttgtcctatttgcgcgaactcagatgttagtacacactcaaaccagatgcaaggatccgaaaatgaacacgattaaataaatgaccaaccttctctgtgcttttcttccaaaacatggcactccatcgtttcttcttaggtggaggcttcgagacttccgatttcggtgtctccgttcttgtcaatgtttgctgggaactcttccgttcttgcctaccctcctcgccaagctcctttgcaaactcctccccaggcgaggtaggtagagggatgttttcggctggttcgcttatcgcaggttggagggacgccccagtaggactttcggttggtgtttgtttattctgctctgttggaggggtaacagattcaggctcggcggtgacttcgcgtaggtaggcttcatcttcaggcgtcaggacaggcttgggcgcggtgatcatctgtgacgaacgccgtcggtgttttatttggttgaaatactgcatagccataatggagggtgtcaagataccaaggacggcagtacgagcttttatttcctgttcctcgatgagaggtgcgataggaacaaagcaagctgaaacgaggcgggcgcgtgctgaatgtaaggggaagcgcgcgctgtagattgtagtgatagatcaactttcccaagtggctacatgatatgtcagatgaaataatatgatgatcaggagatgttgcagctagccaagttgtatgctaacaccaagcttttatttgtgcattcgagcctgttcatcgcgatgatatcactggtggcttccccgcatgtgccaccgcatcactaacaccgccacacgtgctccatttacggactcggctcgaatatccttaaaagagctcttttcttccactctgagaattaattttctggcgttctttatctatgtgtattttgagtggaaggttgtgagtttatttattcaggtgcacctcgctattgtactttagatggagctattcatttttatgtgctcgtgcttagaaaaatccacgtcttcatttgatatcctaggtgttgaagtcaagatgaaaatgacggatctgccgccgcaaaaaatcgcatcacggccattgtgattactgggtaccccatgatcacatcatgcaatccagttttcaagatttcctcgcgaataaccccgttctctgttttccattccatcatagacccggcaactcccagatctgctttcgaatcaagtttcttttgctcaaggtcgtcataactgatctccgctggcatcgcagcattcaccgcgtgccaaaacaaaagttgggaatggtgccatggaatgtcatagtcatcctcggcgtggattatcgttattcggtatttctctccgttgatctcgttcgcccggatatattgcgcaatggaatccttgctcggccatttgtctcgaacgaatcgctgaagatatttgaagaggaaagggaacctcgcaactggcgacaagattggcacggtacccgcgactcgataggttgagaccaatgtcgcgacgtccacaaatggcgcaacgagcaccgtgcctgcgaatactattggtggatcctgcacagcaagatgtttggacacagcgatgctcacggccgtacccatcgattgagcaaagatcaaaattcgagatggagggatgcctgcaacatccattgcccaatccaccacggcaagggcatcgatgatgagcccggtttcagatggtgacccggtactcttgccaaatcctcggtaatcaaaggtcagaacatggattttcccgggactgcccgctgacagcgcacgataatttgggacgcggtaacccgaggcgacggtccccccagcgccgtgcatatgaagaatcaaacgagcctcagggtcatcccgcaataattgaaatcctagccgagacttgatgtcggacacaaagcctactggctcttcgacaagaggtatttggtgcttgcgatataattccacaggaagaatatgccaagcgtatagccattcaccgtccgtcgttctgatggagaacggagtgacctggttcttcaggaatccaaacctttcagggacattgaggtctttgaaccatgtcgcttgaatcgcgtggagataaacgacatgtgattggaaggttgatgtggtgagtaaccctaggaggatcaggtacaacccaaccgcgacaccgaccggtattgacgcatatttaaagaaagacctggctatgtcgccaggtgccatggtggatcgaaaagtgatgatattatcgcgataagacagagagtatgtctcaaaagtgacggctgacatgcagacacaatcacttaagacatgcatgatgcgcgtgatgaatcgcgtattacactgagtttattagcgtataggaggtagaagagcgagatgttggatgcaatgccgttcacaccaataagacctgtcccgtagccgccactaaattagggcggtttttattgcaaggatcagaccaactcccttaacactgttcattttcctatcggttgttcttttttgcttatttgcgtaatgacgtgataggaaaaatcgctaattcttcttgttgtatctaacgtccgtcgagatatgggcgaagcccgtatctacgacctcccatagggtatggggacgtgctaagctatggtattataatgattgtgcgcatattgaaagcaagttctttaaataaatgatccagcaattttaccggttagctgctcgtccttttccgacctgtgaaatggatgcaggaaaaagcgctaaggacttaggagagtaagatgatacattatccatgctagccaggaaccgtgtgggatataagtgatgccgatagtcctggaataaatctatgacatcatgctgattagaacatctattgatataccagatgccttcctagtgccccaaagaggtaaatagcttagactcctgcgcaacctctgccggactaccggagcggatgaccttcatttttataggctacttatatggaaaattaatgcgaaatgagagcgcaataccggagaagaggaaaatcgtcatattggctgcccgatcgagctaaggtattttgatagactgttcgacccttgatgctcgcgacgatatcttccataacagacctagacagggccatgaggaataggtagaaatcaacggaaaaaaaaatgggcggcgttcataataagatagagcgcgattccacacgcagcgagcaatgacagcacggcagctggaacagaaaagcgtgttattgcgcccagacatggacgagagcgacgagctcaagaattgcaaaggtacaaactgctccttagtcaattatgagtcatcactctagaaatatgttacagctatcaagtataccggcttgggaaagtgaaaagtgcccatcgggcatgacgacgcaatcaaagcgaacaatagctattcaaaaaaaagtgaagtcaaaaactctccgataggatgcaacttcgggaccgaaggcctgtctgcggcgaaagagcacgacatgaagcatggccagaaattgtgtcttctccatagaaagaggtatgaactgttgaaagtccaattgagaaaagggggaagagattaccagcaacatcctacagcacatactatacctatttcaatcaaacggggaataatgcagccacatttcctaaataggatctgactgggaccgttccaatgttctaaagttccaaggctgagccaagccctgggggttcctgtccaggtgatgctctgatatttgtgaatctgcgattggcgatttcaactccgtcgcccgacgatctttcttggctcgtctacctacatagacctgtatgtacatcatgatgccagatcctcggtgtagtgggtgcaatatgtcccaccaaattcaaattaaccgccagattagagattgccaaaataggaactagaaaagtaccgccgaatctgttgtccaatttttcctactttcgttggggatgaggtggagagaccccgaaactagatgccacgaggtgggggctcaatatctcatgcaccccacaccgaccctgtcccatgtgacgcatccggggtacgttggtgcctgaagaagattggaaccgaggcagtggttctgcactacggcatcgattccgccctcgttgatctaggatcaccaaccttataatttgataatcctctatagatattctggctcttgggcacatatgtcgggatcgagtatatccatcctaactctagcaagcgtgcaccttatgtagtactaaataaaattggcgaaggtatactgtaatcagcaccaagaggtgactacctcgggattaaacctcgtacagaacttcgcttctgcattgacgctgcatattttaatttatttgacattttgcatcttctaatctggctaaaaccccgcaatgccaaccagataggttcccactcccgaaccctaaactactccacactatggtacagcggtctagtagctagtgcaccaattcggatatacatacccacagcatagtttgcaatatgagttattttataaatcgaaatacaccaatatcgcttcactatgcgtaatgagttcctggctccgtgctctggatttcctatttgggaccatccccgatgtaacccacctggcgcaattccaactcctccgcggcataactatagtgtgaaaatatagtgacagtgagtacggggaaaggtttgaggggtagttgaagcattatttaaagagcaaccaaggcagtttttcttttttctttcatccaaaacagcgctcaagcagccttgctaaatatttcaacaacgttctacaaaatacttgaatattgttccaacatgttgttcaacagtcaatccttgcttgtagggatatccttgatttctcaagccctttctgcacctcttttggagtcgagggcaactgctggtgtgtcaatccaccagcccatctctgttagctaggcagctctaacctcatctcaagccagcgctgccttccctgatttgcaccgtgcagcacagctttcttccgctgcttacactggttgtatcggaaaagccttcgatgtcactattaccaagaggatttatgacctcctgaccgacaccaatgtaggcgtggtatttgctttttacgctagcaaatgactaattccaatagggattcgttggatactccacggagaagaagaagatatcggttatcatgaggggctcgactaccagtatggacaaattattgattttaatactaggtcaccttgctaattaatccagtcgccgacatcttgaatgacattgatattacccttgtcactccctcgctctcgggcgtgaccttcccttccgacgtgaagatcatgagaggtattaacagaccttggtcagctgtacacgacacagtgattgccgaagtcaaatcactcatcgcgaagtacccggattactctttggaggcagtcggacattccttgggtggttccctcacatacattgcccacgttgcactggctcagaacttcccggggaaggcactcaccagcaacgcacttgctgcttttcccatcggcaacgaagcgtgggccaactttgctagttctcagcccggtactttgaaccgtggaaataacattcttgatggtgttccagtaagacatggttgaactttagatgatgcaatgaagtggctaaccgtagcagaacatgtacgtgagcgggcttatcaacttcaagcactatggaaccgtgagtgatcctatcgagggcttttcatactaatatccaatcgcttaccgaccgtgaccatacataggaatactacagcgctggctcgggggccacctgcgtaaagtgcgcaggggaacgagacctggcctgctctgctggcaatggcatgtacgctgtcactatcggtcacttctcgagctttggcattacgatgcttactgctggttgtggcctgttttgagtaccagaagtggacacaactgggcaatatatgatatagatcgcttattttggggacaaagcgattttggatgattacttcctcgctggcgagggatgacagaaatatgtcaaataacctaacatgaccagtctcaatatatatatcatttgacgtcaatcacactctactatggcttgttaaaacagaggtaagtcataacggcgctcttaacaaagataccacgtatattttcattggttcagatctagcgcatgacgtgagatttcaacaccaatatgcacagccctggagggttctcaaagaaccagccacacagaatctcacttcagcctaagcctcaataacaggtgacttcgtccctagtcacatttgatatcacctgacccccgcattaaaaccccctcttcccattttccttccttgttttttctctttcctcccacgcctgccggagtcgataacttttcgctaagagagtcattccagattctcgaatgcagagccatcccagaactgtgtattcctcgtcttttaattaaggcacggggggaccgtttctgaggggagcttccaagactcacatgcttcgtgtgcatgactagcagcgtcaatctgtatttctttcgaccaactcgtatcactccttctgataattacaagattatttcgtcattcctgaccgtcttctatgggcatatatcggcaataggattactttgcgccgtcatgttcaagcgctctttcgtatctaaggaccgggcgggtaaaaccgtcaaggtcgccaagaagaagtacgacgagctggttaaggagaagatgaagcagaaagtggaaattccctcaatgggaaggtgtgtttcctttttatatataaatgcggacctacgctctccataaatatcgacatctatttcatgtgctgatcaatgtatccctatagcccccttaccagccctatcattactatgattgttggccgggaccagcgtctcttcgccgcccatgaagatgtcctatccgtgtcgccgttctttagtgctgctttgaaggagcagtttctcgaagacggtgccaagcaactgagtttgcctgacgagtgagacaatcctgcctattcgattgagcaaaaacttacacttgagatagagaacctgagattctgtcgtgtgttctcgagtttttgtacaagggcgactacttcccgcgtttgttgcgtggaaagcagagacactcttggtcactcgagaacgcccaggatatcaatcagactggtggccgtggatcgagcgagccgacaatgttccactccggagtgggagatctcgttctccgagacacagcagtgtactgtgctgccgagaagtacggcttggaagaactcaagcgccttgccctccgaaagcaaggtcttcagagtggtattccagccgacgtgatcttgcgatccgctcgatatgcatatgacaacacacccgagtctgattcccgactgcgcgctcattacctggctcttatcatccgcagtcgcaagactttcaagagcagcggaaccttgcagatggagatggaggaaggaggcaagttgttcttcgacctgtttgtggcgatgtgcaaccacatggatgacctgtcggagctgcggtacgattcactttctccttctccttctccctcaccctagctctctgcatatccctccgttactgctgactgctttttctatcccgagtcctgagcgcttacactcgtgtctaccagcaccaagcgatcgccgaggtttttctagacggttgtaacatttcctatgtactggatcgagcgactggactatgaaattgaacaagaaaggcatgcatattttgcaccagaatgacagcgaccttgccctagcctgcgtttttgctttgacagcagcttgaccttcgcttctctcgaggttggccgccctttttggattgaagaaccgaccttattcgcttttaatcggacccacgacgtatgttgacttgcgttcgaccactctacactccttgagattgagttttttcgacacattctttgatgatttgcacttattccactgctcttgtttgcgacagtgattatgcctttgtccctaatcaggcgatgcgttcgtttatcgcctaatttactcttgggcaaggcgcctacttagtgatgagaaacagaaatgaagaaatttggccacctcaaacaaacaaattgtagaagcatttgccctatgcatgctaatgttgtatcccatccccaaccatttttggtcttcagattattgcaagcgtttgcccattgatgcactgaatcgtggattgattttaggttttgaagcagaaattcactacgccctcttcatttcaaggaagggaattggtgttgtgaataaatgtctgctaatttcgatagttttattttccaccggagtcgctttcagacatttcgcacaaccattctcggacctttatacaaaatctcgaccccaaactccttcggagtcctctgggcacatttcgtcaagcgttgttatgaccgatagtgttcatccaaggttatttaatgttgcgggaacagacaagtttattcctatgcaataaaagcctgtctgtagcacatcagaactgcaggctaggtcagtattctctcgtatatcaattgaaagctcataggcagcttttaagtccctgattacagtcattacttgccaataagattggcttcgagtttcttaggtgagtctcggaaccctaaaacaacctaggcaatatccaggatttggggtctcttcttcacaacgacatgatttcttaactctgatatacaacctcagtaaagaaaacctcggggttatcgccaagatgatatttataaagtattgattcaattgcagtcaagaaaacgtttattttctacgacaagaagctctcgcccgtcgcttacaccgacgcattattaaaccgcgggctttgcgttgttctcaacgttgatgggcatctcaatatcacttcttctctttcatagtccatatagcctctacctgtgctagcaaaggcaataccatgtgagttatctagccctcattgcaagctgattccggcgacgcgaactacatctgcgagatttctgaccattcagtctgcgctcagaagcctgtttcctcttcttttaaaggtcattaatgatatctagtaccagctgcaattctttaaccaatttcacaacaggagtctagcttcccatcattatactcttggttctatctccggcaactcaatatcgtctttcggattgatcgcttacaagatcaatcatagcttcacttccttctgtacttcaaaaattttgacttgcataaaacaatcttccagtgatactaacgaccactgccagctcccggtgacaaagaccaacaatcatcttctcagaagagcaacgaattcttaaatcatccatgcacaacctcacaaccaagatgggacctagaacttatttgaccactgacttgaggcacctaggcaagccacgcccgctggaggctggtgagacctatgttgtccggttcaaaaactccctccgtcagtacaaagctgatgtttggattggcgtcgtgctgccggagaaattcggaccaagcagacatgtcaatcgccgccctgttggtgcccagccagttgagggtgtctggatgacacaccttaaagaccgggtttactcaatctatcttccgggacggaatatgtagtaagtttgatctcctttttaacacccaaaaagacacccaacgcggtgtgtttattgatgtatatatgtgtccgttggctttcctgcacgttttttcatctatatgtcactatttctgattgcacatatgcttgtttgtctatacagattggaagctaacatgcataaagcagatgggtcgggctgcaggatctctttgttctaaatgagaaaaccgtcaatgtcctccggcgtgcgcagagagaacaagatgctaagatctgggatgatctggtggaaatcattcgaactgagcccggactagaattctggaagaacatggctctccaggagcaaggtgctaagggcaaacgaggcaaggaactgcgtctcatcttaccgagtggccacgaaggccttgtctcctgtggagaaagcgatgaggaatctgagtccgaggaggaagataaagaggctgacgaagaggaacataaagaggctatattagatcacgccgagcctgttactgatgttgcacccaacgcatctaatgggcaatcaaccatgagatcattttctgactcgcgtgctgcacagggcattcagttcaggcaggaattgggggttttctcagatcctacccccgctacaattgcatctgattccatcccctttgcagacagagagaactctaccttagggatgacgaagaaattccagcctttcatccctctgatacctcatcccccttcttctcgcccaacatcatcaccattcattacgctggcgaccaccatgactctgaacgtgatgcccaaggttgaaaatgatactaggtttgccaaattctaatgtccattctccacgcacattcactgaccaatatgttttaaatctacagtgatactgctagtgctgttgccgatgtggcatccgagaaacccgctccagaggtctcgatcttcgacctgaccctcaatcaggctctgaagcacgtcttcctgaaccagcatgaagccgccaagatcatcgatgttttcataggtgccgtggctcttgagagacagcccgaacagctgcagatttgcgagtacctggccaatggagaattcactcctcgcctgattacactcaagaactctggcttctcccaccccactccattcccagcctttgattccaacggcgccactatctaccgcctggttggtgaccaaatgggcattggtcagaacttcaagttgaacggtgtgggcaacagcctcgatctggaaaacgccatcatcgtccttggaagagtgtacctccaagcccgtcgttttggcctaatggatttggtttaccgaattgcattcaagctccaagtcgcctggaactgttacccggagctctaccaatgcaagcccctgcttgaggtcgcttctcttgctttcaccggtaacaccgagttcgaggagcccaattgcgattacctccagtcgtggttgattcatttcattgccgaggcctccgatttgctcacctacaatgctagcgagcagttctggtcgttgttgcgtgcccatccaaagctccaggacaaggttctccacctgcgcacgctggctcacgtcaataacccggagttgtatggaaatacccgtgcgctcctcgacagtcgtggtcttggaaacctgtgatgtgcattctgatcgagcggggataacacagtgaactgtgacccccttgtctcccaggtgcatatcaagcagattggatttctcaactctgcttgcttggttcatatttcgctttctactggtttcgaccttggatcatttgtattcttgatcattttgcttttttgcgtgctttttccttgcatttgctgattatgagctccggtcatttcgatcttacacaacagaaggagtcacatctcaatggttttatcttcttttgtttccgttgctgtgaggtggaaatagtgaggccgtgcaagcccatagttagcttttatgcttttatcagggaattattcttattcaacagatttcgtctttgatactcgcagtgatagatagataggccttcaagcgtactatgtatttcaaaggccacacgcagcttgaatctcgcaagccatagcgacaagagtagatcctagtatccgcccagcaaccttgatgtacaaaccaccttgctattgaatacctactgctgggactattttttttaaaaaaattgaattcgttatgtcaactcgtaggctaatcaatggtgagaacgatcccaaagtgcatacaaatatggcggtgcacctgtgcaaaccagccatcgctaaagggaaatcgaacctcacgcctagaggaagaaaaagaaagaacaaacaatggaaagaacaaacaatggaaagaactgaaagaaaagcagaaaatcaagattcgttaaaaaaactacccgagagaaaagaaataccagttacaacataaaaggcggaagacaagaaggaggtggtatttcttttcataattggcatgactgccaattcatccacacgaagtgggaagctcgacacgaagggaaagacacctcagtagtcatcgttagtcttctcagccttgactggcttcagaggagactcagactcaaggggcatctcaacgtcctcagccttgattggcttgaggggagactcgaggggcatctcaatggcgccctcggcgggcttctcggcgtcgatgacaataggctcatcggaaatttcgggggaagcaatcctaatctcgggagcagcctcggtcttcacgatggtgcgctcaatactgacagatgtctcaggggaggcctcggaagactcctcaacagcctggtcagcgggcttagcggcgaccttcacggcagctggcctgcgacctctcttgggcttctcggtggtttcagcaacgtcgtcggtggacgcctgcttagccttgttggctgcaggcttgcggccgcgagttgccttgggcttgttctcgggggtgctgttgttgtccttggtcttgctggtggcactgcgagtgcgggacttctcggtcaactcctcggcttggctatccttggaagcatcggattcgctggtcttggcttccttggtagccttagtagcctttgagccgttggtctttgcgctaacagccttggcacgggggacagacttcttggtcttgccgttggtagggctagtctcgttgtcggtagaggagacttctttgttgggagaaacatcgttcttgggatccttcttggcgcgagttgcacgcttcttaggctcggcggcaatggcggtctcgctgtcggcagatgagatatccttgtcgacgggggaaacatctttgtcgagatctttcttggcactggaacgagtggaacgagtggtacgagtcacagtcacctccttggttggctgatcctcttcggcaggctcaacttcgtcggacttctcggtgtcggtagtctcagagggagagactttcttgctgggagtcgcacgcttggtggacacctccttaggctcaatatcgggagaggcactgatcttcttgccacgagtatcatgatcatgcttcttgggttcagcggactcggtggtgagcttagtgtcagcatcggcaccttcgtcagaaactctcttggcgggacggccacgcttcttgggctcggccttgacctcgttgtcggcatcaggactagccttctttgcaggacggccacgcttcttgggctcgaccttgacatcggtctcagcaggagcaacttgctcctcggcagccttcttggcgggacgaccacgcttcttgggctccttgggctcagcctcaatgacagtggcctcagagatagcatcatcctcgtcagctttcttagcacgagtttgcttcttcttggcgggcccctcggcagcatcctcagaatcagtcaggccatgcttcttggcaggagaggactgctcatcatcgtccttcggctgttaatgaagttagtatgtcatatatcatgaggatagaacatggaattcacctcatcggccttgcccttaccagccctgacacgcatgcgagattgtccagggcggttgcattcaatatcctatgaaggattagtcagctgatctacagtctttgagcatcaagacaggtgaacttacgcccttccactcgtcgtcttcgacgtggcccacttcgatggccttgcgaatcttggcctgtagttccttgctcatctcatcaaagccatcaatgcgagagaaatcaggatcctcgctgttctcagtgagcgccttcttgacgttcataatttgcttgggggtgaagcagcccctgcatggatgtcagtactcagggctatcatagaccttatgttttaacaaggctagactcaccagtggcgccaggaccagctctggaaggtcgagccgtcaacccagctgccgactcgcaattcacccttggcgatctttgtcttctccttggcacattcagagcctttgcagccagcacggccttgagcagcgacctctgatcatgaagttagctgtgatgtcttgaagtctgtcatggtgccttggatttgggagaggtaggtgtttttgccagaaatgccataggttagggcacaacatgacaatatcagttgtgaaaccaggcattttcacttgatacaacagatatacatccatcgaccatgagcacagcagtaggaagacatagagatatgagatgaagctacttaccgaaacggtagggcattttgactagtggtagtcaaaagtagggaaaaaaagatgtgtgagagaagttaacgatggttgtgaagtgaagtaggtacatatagttttctactagcaggtcgctggcgaacaagggaaagtgaacaaagaaagcgagaatcgtttgcacaataaacgcagtccgaaaacaggcaagttcgaaattgaagttattgtcagagtcaaatgaatagaatgttacacatgcatgagcgtcaattgactttgaaccgagtattgactcacgttctttcattgttctcagtcgaccgtgagtactcgtgagatatgaagtggctgggacaaagaacgtgtcatacccctttcggacagctgtgttttctggccaatcagagttcttctcggcgcataatcacattgtactttttgtcaggatttctttctgaattataattaatacattcgactagtgtgtatagatccgacctactagacctaaaaggggctggtattaagtgctggtaagaagatgaaatctattgttcaagtggtagtccaagtattgttaactccaatagatagctcaaaatagacaatagttatccgcggcaaagttggagtcatagaaatgagggtatcatagcatcttgtagcataatgaatgcaaaatttaacgatgtgacgagaagcgttcgcccacgttcagaatatgttggtgggagtcgatcgtacctgtcatgatatatttttagtcaattttgtagactttcccattctataggcatacgttgtataaacatccgtcatgggaatctgacagaacgtaatgctaagagaataagagtttcacattagcatcattgtctacaagctgtcctgaaacttccaccatgcgtccaggacatcgttgtagcccattttttccagacgctgtgcgacctggcggcgctaatcttttttagaatattcattcccataattaaaatccattcctgcggagattcggaattttgttctgacccattcgatagggacatagccagcaagctcccagtcgatgatatctagcgagcctgtcgagatatcgacaagaatgtttgtaggaccaagatcgcaatgataaaagacaagtctagagacatccatagacatctcggtacaattctttaggagctggaggggcttggaattcggaagaggcttggaattcggaagaggcttgggtgcagctgagagagcgaaatgcccccccattgccgtcgctccagcatgcttggtcgggtggaatattgtccgggaggggggacgaataatgagtaagaagaagcgtatttgagatcagccaagaacttttgtcaacttcttgtatcgagtcattgaggtgcggctgaggcaggttaatcgctgacatgtcgattgatgttgaggttcgaataaacacaaatattgctgtagccgttttacctatggctccccgctcaccgtgtcagtgtatactacagtatctagaagatagccgattatcaacaagctaaatagcatagaagtaagtatctcgaactaacaatcgttagttaactatacaaaagaaaatcttcagaaagggtatgccgctaaccgaaggcggttagagtatgtcgacgttaaaggttcaaggttctacatcttgagcttgttactacttactactcgcctttctcgctgctttgaataaaccaaaatctacacagcacacagtggaaatctcccagaaactgaaggccaggctcttccaccaccaatttaaagccgaagacgcgaatccctctcactcgcgcaaaccccacgattccacgcggtcgcatcacctctcctcaacccaacatccacacaatgtccgagccaggcccagagtcgatccccacaagcgcggatccccgcagcaagcggccaacaaaacggcgcgccgtgacaccgcattccgaggtcgccaaccagatcgagacactcttcaaagacccgagcaaagacctgcaactaccggatgtcctgaagccgcgcaccgtcgcgtccctgtcggcgccgccagagatcgtcaccaatgtgcagggatcgtcggccggtgcgggctcgggcgaattccacgtgtacaaggccagtcggcgacgggagtatgaacgactgcggatgatgcagtccgaggtggataacgagaagaataatgagacttgggagaaagagcgggaggagaagaagcgcaaagatgacgagaagacggagaagaatcggaaaaggagggagaagaagaagaatgcgcgtgggaagaagggcggtggcgatcataaggatattgctcctgtggagagctcggctgccccgggctcgatggtcactatggaagaccaaaatgggggcgatgtggatggccaggtggcccagcaggaagttcctggtgtcattttccacgatgaggactaggggcagatttaaatgctggctgtgtacgatacgaagatacccatctggatttggtttttttttgaatctaggatattcatacagaaggaagacagccatgaggcaaatcgtgtaacattatgtacggacctcgagtccaagtatcatttttctttttcgtctatcaatcattcgtcgccgccaccaccgccgccgctgacctgctgggcggactttgcgctgcagatgtcgtcgacacggagaaggagacatgcggactagaaagagaaatatgttagtgaaatgtagtgtgtaggaaacagtaaaagcttacctcgaccgcagtcttgatgctctgaagcttgacggcttcgggctcccaaacaccgtactcccgcatatcaaccaactctccagactcgccgtttagaccccaggtgttgtggccctcgacatgcttggcacggagactggtaagcacacggatagggctagcaccagcgttctgggccaatgtccggggaatgacctccatagcgtcggcaatggccttgtatggccactgctggacaccctcaacggagcgggcaagctggctgagctttacggagacagccatctcagtagcaccacctccgggagacagacgagggtggaagataacgttgcgagcaacggacatggcatcctgcaagttgcgctcaatctcgttcagaatatccttggaggggccgcgcagcaggattgtgcaggccttcggggtcttgcacttgcgaatgaatgtgaagtactcatcgccaatcttttcaatctcgaacagtccgcacccggtaccaatatcagactcctgaatgtcatcgacgcggttgacgatggtagcaccggttgcacgggcaatacggttgttgtcggtctttcgcacacggcggagggctgtgatgttggccttcaccaggaagtgctgtgcaagatctagtaaatctcggtggttagaacatgcaatcaatcattcttaaccaggtcgcctgcttaccggaaacacccttctcagtaataacaacgtcaggcttgaaggccagaacagcctcgcacatgtgcttgacctgctcctcctcaatctggagaatacggttccagtcatcctccttggaaatctcaatgttggtttgagactcgcccttcttgtactccagggggcaatccaggagaagaatacgggggttctcgattctgcgacgcatcttgggatgcgtgatatctttgttgaccatcacaccatcaatcacctcagagtcctcaatttgaccaccggggaccttctcaatacgggcatagcgtttgatgtcgacttcctgctttccactaccgacatcgaaggaaacggttcgcacagccttcaatgcaagaccgcacatgagctctgaccaacgggacacgaacttggttccgatggaggactggataagactgtacatggccttatcatcatgaatgtcgacgggtgtcgagacatcctccacgatctgaagggcatcggcgagggcgcgcttgaaagcctggataatgacgacggggtggatgttgcgttcgagctgggggacggcctgggcgagcatttcaccggctacagaatatcagcattgactatcgagtcctccgaaatcaatattgccatacctaggatgatgactgtcgtggtaccatctccgacctcctcgtcctgggtacggctgagctcgatcatgctcttggccgcggggtgcgacacttcgatctctcgcagaatagcgtggccatcgttggtcaacacaataccacccatagggtccagcagcatcttcaacatcgccttgggtccgagacatgaccgaatgatatccgcaacactggtgtttattgaattagcatcgagcgggggagaaaagcggaggattgagggatagcgtacgtcttggccgcggtaatgttagacatctgtgctctccgaccaacctggcgctcgccagaattggtgtctggatgatttgttagcacttaaaaggggagcaacttgatgggggggtaacctactcatcaccaccaccggagcctgcatattggcggtgatttattgtagttgagtgggaaatggatacaaaagggtcttgatcacttgtgaatatcaaaaaaaatattgcacgaagatgatgatccaagagttcggacgtcaacgctgttcgcccgcgttctattaaatttccaggcgaagtgggagctccctcgggctagtccatatacggctagcgtggggccctgacaaactaggcaaacatctccaacttcgttatctagaagtctataaagctgtagttcaatatatagtctcactacttttctcattgggtatttctataaatgttcaaatagcactgcaaaaataaaagtagtctaggaaaaccgccatatccgacctcagcatgccaagcgactaccataccaatatgtgtcttcacttggatcacccaacttgaaggacatgacgaacaccctgggcaaaattgttagcttattatctacggcaccaatgataatagaaattccaatcagccaaaccaatatgaaggataactccgctgtttcgtaaagggaatatctggatgcaaaatcacacaaaacgagcaaggataagtacgggctaacgcaagctatgaaagtagtgtacaagaggtggagttttgttcaaaattcccggctctcgccaatatcacacacatcgaaaacaccagtttcagcaagatcatgttttttcaacgcctccttgagcttcttgggaggctcaagcacatcctcctcagtaagcacccaagtgccccagtgcatgcccaatgcatttttgcacttggtatctttgaaaatgtgaacagcatcatgagggtcagaatgtgcggcactgaaaatatgacgaggtgcgtaggccccaatggggatcaagccgagatcaaatggtccccggaactcacctatctgcttgaaggcagggcaaatagggaaattgtatttagggtcccaatcatcctccccttccggtagctcgtccactgccctgtagccggaatcactagattgaggtcagcaaagcaacattctgatagcgtagatggtttgggaaagatcatacccagcaaaatacaccttgctaccgccagattcaatggcccaggaagcccatagtgtcttgtacttatcgaaaggactgcgggcagtgatatgctgacaaggcagacaactgatgcgtgccttgatatctgctgtggcggaagcttcgcctacttgttcaacctggggattctttttctcctcgggtgacattgcaatatcacgctcatcccaccaatccaactcggttacattttggatgcccgagctgtggaaccaagacttgttgccaagtggtgcaaagaaatggcaattggggtgccttttcgcgatttccgagatagttgggtatgacagatggtcgtagtggttgtgggagatgaccacagcatcgatgacagggatatccttgatctggcatggaggctcagtgtagcgcttcggacctaggtgatatggtccgcagcatggcccacatcgcgcttcgaatactgggtcaaacagtactcggagaccgctcgggaactccacataatagcatgcatggccaagccacgttgaacgcagcttgggggtatctcggctggggagaaattcgggcttgcgaacggtgacagttggaggggtggtatcgggattatttcctttgccgttgaatcgacgagtactatagttccatgtgttagagactggcttcctgcgataatcgatcggtatacctacatcatcatttgcatgatatctcttgaagtcagatcgcgaaaagatctgtcatacggagttgctggttagtctatacgaatgattgcagtcacggagcgtcacttactcccacgggttcctgaatccattctgtgcatggtgacttttcttcaaaacatcttccgggctaggtctggccggggagttcgccacagtcagcgcatatagcactgcagtagtgggtgttgtgctcatgttgcggattgccggttgaacagttcgtcgataccaagcccgccaaaggagcggataacggagaagaggtcgcatcgaaggccaaggcgttagaaaataacgccacacagaatacgctggcgccttaaggacaggaatgcgagaagcaggaagttactttaataccgataactccgacatggggccttcgcgcgttgggaacgccgataccaccggagttccagcacatccgtccccatcttgattgcttgtagaccactcaaggtacattcaaacctaggaaggttgtagttcactttctcatcgtcggtctcccatggattgccctgtgaaacgcccgtgggtacctcaaatgctcggcccgttgtaactccgatatctgtgcttatcgatcttctcaacattcgcgatcttcacgacactgttgatttggtatggagccaaatgcggtccctagcgctgcgccgtctgcgggcgatctgattctgcagcagaaaacacaggcgctacagtcggcccaaaacggcgacggaagtctcctctcgcagctaacgagcaatcccttgtttaccgcggtatgagccgtgccagtgtttcgatcccagatgatgtgctaatatggttctctgctagggatttggccttgcaggtctcggagcaggattgacactagcacagaaaggtgttcgacatggcgccgctcttctccgccggcggatgctggtggacgtcgagatcagcatcaaagatgactcgtatccgtggttcctacactggatgactctgtaccaacaatcacaactcaatgcaagcaaagccgctgcgaatacctctacctacatggaccgattcctccaaaaactcacgcccggcatgcgccatctctccatccaaacgcagaaagtcgaacattcgaacggagcaattgatacacgcttttcgctgattccgggtcctggaaaacacgttttacggtacaagaatgcgtttgtctttgttaatcgtatgcgcgagtcgaaatcccgcgacattcagaccggaaagccatgggagacaatcaccctcaccactctctattctcaacgtcacatattcgaggacctcttcaccgaagctcatgcatacgccgcgaggggccacgaaggcaagacgacaatatataacagttggggtaccgagtggaaaccatttggaaatccgcgccggaagcgtccactggagtcggttgttctccacgagggagtcaaggaacggattgtggcagatgtggaagacttcatttcaagttcatcatggtacaacgaccgtggtattccataccgacgaggatatctcttatacggacctccgggcaccggcaagagctcttttatccaggcgctagcgggcgagttggattacgacattgccattctgaacctgagcgagcgcggcttgaccgatgatcggttaaaccacctgctcacaattgttcccaatcgaacgctggttctgttggaagatgtggatgcggcgttctcgaaccgacgcgagcaaagcgacgcagatggttaccgcggggccaatgtgactttctcgggactgctcaatgcacttgatggagtcgctagtgccgaggagcgcatcatcttccttactaccaaccacgtcgaacgactcgatgaggcgttggtccgtcctgggcgtgtggatatgactgtccgtttgggcgaagtgactcgttaccaggtcggctccctgtgggatcgattctatgaagacatcgataccgacggggtttatcggaaacttttcttggatcggctccaggagcttggcttgattgaagatgaatcaggcaacaaggctgatcggtctattaacaccagcgcggctgctctccagggcttattcttatataacaagggtaacatggaaggtgcgattgccatggcggagggtctgacccataatgtgcacgctgagacattaggtcaagactaagggaagaacgaataattgtacactatcatgtaaataaatcatcaaaatatagacatccttgtgggctgcgtcctttagctcatgccccattctcggcgtttccttctatatgtctacactgtcaggctgatggcagtgcatctgcgcggttctccgtccactcgttcttaacagggaataaataaccaacaaggatgagatgcggtgccactgatacgatcgacccttagaacaagccaagctttatgacctgaagattatcactatcagcacatgtgaagtattcctgcaccatagaaaatacttctcaaatccagggcgagcaattcccatttaatcgcgcaatttcatctatcagtattataattcggcctttcagataccggtcgccatgaaatagttgttctttctctcgccgatgactgaactgactgtcttagccatcaccctcattacccctctacaattcacatccgttcctcaccgccccccgctctccgtttttcgtccgtatgtgatagcaagatcagttaggcgcttttgaagagtttaatatatggtgtgacccgtgtgttgatgtcaatcctgtttcttgaaattatccatttaacaatatccggagccgataagatgcagatactagggtcaacagggtcaacagggtcagcagggtcaaactccccgacttcttcaacgcaaaaataaccagccaatataatctccggattctgataaatatagattcctcatgagccaagcaccaatcaccacgctgtatcgaagcgccgctactgcagctgagatgtgcccatcccaggatggaggccaatcacatccctaaacggttaagcgcccactcgtataggcagggttgtcacacatctcgacaaaccatatactctgcttggtctgtcgggctgatgcgcacattcggtgagaatgggttatatctcacccgagaccccctgctttcgcgttctgtctttgtttatagcattcattcgcgaagatgggtgacaagatgaatcaatttcaattatttcctgctccatcacccgaggtcaataggtccaacaacccatttcgcaaagtcgggagaaagccagtagccacatctgagccggcttcttcgatccctcttcaggaaatcaaggaccctggtaagactgaatccttgctgcttcagattatcgaagacacccagggtattccacctccgccaaaggagaatggttcgaaatctaagtccccaccttctatggtgggagcatctgattcaaaatctcctcagtccatgcacagtcagaatcgtgaagccaagagagtgaaccatcaggccttgccttcacagggcagtcaaagcagcagcagtagcagccaccacactacgccgtcaactgtctctccgcagtcatcacaatcgtctgcttcctcagttccgatgaaatcaatgttcccgcagttcaatccaaaactgcctctcaaccagcaggtatatcacccacggcttccaaatgtgccaagtccagccaagtcttctcgaaagcctcctaagcttacgctttcgacaaatactgagattgaccatgttctcgggccaaagactgtgcctgcaagtgtgctcaacttcccaactggtgcattggagtccgaggaggttacatactcctctgtggaggaactgaagatgttatgggaaacggccaatggccagagaacacgagatcttgttgggtcattgaacctgcgcatgacaaagtaagacttcttgccttatagatgtataatactaacatctcacagaacgggaccagctacatttacgctcggaaactcccagaacccgttttacacactacaaacatattcaaccaatgaactcgctctaagcaggtgcgacccttccagaccaaaccacgatgtaccaatcatgatgatgagcctcgaagaccgcatacgtcgcgagcatcccaacgacggactcgtgaccctactcttcccccgactagcagccatgttagctatagaccaggccgacgagatcagcaagcaacaccacctcacgcccgccgagacggcggaagtagaaaccgacgcactcaaacgggcagcagcacaagagtcctgccggctctcctggaaccgccatcaacgactatacgagctacggcacccatatttctcaagaaataacccacctgctcttgtcggcgccgccggaatcccactctcacccgtgcgatcccagtcatcaggaatggtgcacatcacagtcgatgcctctcctcgccagccgccaacaatcatcgtaactggcccggtctctccaacggcactggaagccggtctgcaagctgctaatgcacgcacatccgtgcttcccgtcacggacctcgacgagccgctcgcgtccttggacttcgctacgaagacattttcgatttcgccggctgctgtggtcgctactattccctccctgtatgccattgattctctcattgctgcaatgttagcagtcgccgtctcagatgaagccacgaaccccatccttgcagacatgcttctcggatcgccgaagtcgtctagacctccgacctcccacaatcccgggccttactctatgcctgtgttccagggtaaactagttacgactgttgctgagcgccaagatacagcagagagcatggatttggcatcgcagattaaatctgcgcagaaaaagtccaaagagtcggggaagaaaagtaatctcaaattatggagtagattctcttccaagacgaaggaaaattcgaagaagagcaaatctcagcaggttgtggttgaggagtttgacctggagaagtatggtcgatatggcaatagttcgtcgcgagaggggaagaagttgcctggaattactcgcaccatcttgcgtatactgttctttggcttggatatagttgtgaagggattgacgctcattgtgaagatcttggcttggttattggtcaattcgacgcggtgtgtgactagtgagaagttctgagctgggcttgaatcttcttattctcgatgttggttactattgggttttcctttatatggaactgttcggaagcaatagggtgagttgttggaccatgtcttagttatactgttatacccaatttgatagttcttcgcgttatctttagactctaagaattgcccattatgttattcccacacagtactcaatgtccatatatatacacgggaaaattacatttggtatcgccaactgattgattgatagcatcttaagctatagcctatacctatcgccggcagatccatacttcgaggtgacatatttcgactccttggatattacatctaagcactacatatcatagcaccaaggtggtatcgacttcgatcacaagtagagaatttggattcctttgaattgaacggttaccagccatcttgaataagatccatgaaacagaaaaatgagactgtcccttgatcctttaatccaacattcttcggagtataggacctagggataagccaggaacgtcacagggagatgacaactggtagattcttccatcagtccagtacatacaaacgataaacaggagaccaagcgtacgtggggctggaaaatgccacctgaagcttcactcttaggataagcaccgtcccggaattcctagacgtcataaacgccataacaccgcgattaagggatgaagggatatggatgtgatgtcaaagcatttatttcctcgggaaataattgataggggaatccaattgtaaataaagcaccgagtattccacgaaccagccgttccctccatagcttcgttccgttatatgctagactccccatcctagtacaactacctccaagctcgcaaaccacttctccaaaaaccacacaatatccaaaatgcgttccttcatcactgcctcagtcctcatcgccggcgccctagcccaatcaaccgaagactacctcaagtgcgccgtaagaactccaacccaataaaccaagtacctaaacaaacctaacaacccacccagagcgccgccttcagcaacatcaacacctcaaacttcacctcctgcagcaccaaaacctcccaagaatgcttctgcgccaacaaatccctaatcaaagccctaaccacatccactgccccagcctgcgccggcctcgacctaacatccctcacaacctccctctgcagcaacacaacagatgccgcacccgcacgacacgcaagcagacccatgcagctcgccgacaagaagcgggccttcgcacctgcgcccgcacctgagcgcgaagccgaagctgctgttccgcacgtcgtctacgtgactgagacacgcactgattgcagctgcaagagcactccggttgccgaaagaccgatgcatgtctcgcagattccggttgatgttcccgctagcagtgccgcttctatggcggtggaggcatcttcgacgccggctagtcggctgcatggcttgatgggtggtgcggcttcgtcgtctgtgatctttggtccgcaagctacgtcttcggctgtgccttctggtgttgatccgactcgcttctcgcctttcaagggggcggctgcggcgggcgcttccgtgcatggtggtgttgcggtgcttggggttgcggctgctatggctgttgttgttgcattgtaggttgtttgaaagggtgcttctcgtttatttttgacttggttagcagttagtttatatttggggttttgagattgatgttcagatgggttcggacttggtaatgatgcatgaaatgtgttttggcagtgttattagtcgtatattatcttcaattagattaacgttcaccgatttttgctgataattcatacatggcgaaaaagcggatagacattccacctatagacgtaagagtaaaactccaagacccctgctgcaactttgtctggagagctcaagcgtggactgcctgctggactctagggtaaatctccaccagcttgtaataaatatccgggtggtcattaatcatgacctgaggatcccaagccatcgccacgaagatggtctcaacgccactaccaatgggagtcatgaagacctggcagacctgaagaccaatcaagaaagcgaaagccatgatgaccgcggtgaagttaccatccctgttgtacgcggggttggtgaactgcagatagagataggacaacagcgcacagacataggcgacgaaagtcgaacccatagtcaacaccggacccatcaggcagtcttgcacgagagcatcaattcctcgatcgcgcatcatagaccaagtatccttggctgcggggatatatgcctttccgtacaatgcgatgtgacagaacgcgtagcgattgaaaagcgtaacgagccagtccaacagcgagatgatagatcccaaaatccaaacgaaaatactgccgaccaagttaccctgtccagcctcttgtcgctgcgcgaccgagcacgcctgccgcaacatgttgatgaacgcgatgatcagactgccgaaactgatactgccaaaggagtacgtagtcgcgcgacggaaggcgccccgggtggagcccttgggcatgccgccggcggacttgctgaagaaataccacgaaccgtagacaccggcgacggtggtgtgcaccgtgttcttgatccactcactgacccagtacatggcgaaggtcacgtagacgacgaggccgatgacttttgctctgctgcagccgccgttcgtgcaggatgggttgttgccagtggaatcgggctcgtaggcgacgtagatcgagaccatcgtgacggagaaccaggcggcgaaagcgaccgttacgattccgcccagcgcgctgactacgaagatgtgcccgtaccctcgggccacgtccatggcggtctgcagcataaaggcagtgaatgggattcgcgggatccagctaatgaaacagacgattgcgaagacgccgaagatgaggaacacgataccacctccatattgcttgcgcgcgatgtaatagattcctgttgccaaggcgaagacaatgttgagaatgccggtcgcccagatgaaggtcttggtgaagtatcttgcgcccatgaaatagagccaagagaagactagggcgacgacaaggacgaagataaacaagacgagggtgttggtgtccagcgagaaatcattgctcgagtcgtaaatgccacctccgttgaagcctttgttggtggcatacttgtggatggtaagtccggacacggcggcatacccgaggaagactgcgatcaactgtgtaataggttagctaaaggaggttatcaactcgacacggccacactcaccaaaagacctgcccacaggtcgttccactttggcttctcgatcttgaacgcctggtcaaaagtgtatccagactctgggacattttggtggtactgcggtggtttgggctcagatggaggttgctgataggctggttgctggtatggcgcattatttggcggttgatagttcccatgttgctgttcataaccagagttgggcggatactgaggttggccctgagggaagccctcattattgtaatagctagcagcctgtccactcatatctgcgacactgggagaagggggaaaacaaacgaaagaaggaaaaagaaacaaaaggggcagcaagggttttttaggtttggctggatttgactggtgacgacatgaaaagaatcgcaaacctcgattggcaacgaactcagccctagcgatcgccgatctgcgctaaatcgacccgtggacccttttcttagatcgttgaagatttccgatcgcctcgtcatagtttgatttgacggagctttgatttcatctgaagagtttccatggctcgtgagaaatccacaatgtaatttggacatccggaaattggagagcaggacctacaacagaggtacaacgagaattatagtttgcccagctttgtttctgtcatgtcctgttattacagccctataaggagtagtggttaattaactaaggacatctaccaattggtaactggattgcctaaaacttgagaaatgccaagtcggttgcctgcttggcataggacttcgttacgccagcaggaatttgaagcgacttgatattgccccttaacatatgctcgcgttaaccttggaaaacaaggtggattgggtaatcacctttgatgcagccctggcaacattggcagtgtgaacaattcaacgagtatatttgacatcaacaaaacgcggactggctgtcattttcttgatcacaagattcattcattgctactctcgagctctctagtagggcacctccatagaccaacttttccacaatgcctcactggtcatgcgaatgggaaagttgtaagaaaccagctgcgcagagagcaggagattgcttgctatgcgataggcacttctgtcgcacgcaccgccgagagccgtggcacaaatgcccaaagccagaggtttgtggtatagccataatacaaatgctcatgctcatctaataggaaaactgggaatcatactctgctcaatatacagctacagaggctcctcacatagacgagctatgccttcgaatagactgatattgttggcactctctttgacgtcccactaggcgaccaattctttcttaagcacccggatgataagggcgaccatattctagttaaggaatgttacaatattgtgggtatcatcgactaggaatggacgcaaactgtctccaaggcggaggcattctgttcccgtctatgatgtggctggcagctaagttctacaccggctctcatgagctacccgcggacgaattgcagctagctgctatctttcgcgaaaagggccgcgaggatcttgccgtctgtgtcgtcgagggcaggaaggctcaaagacttttcttcgctcttggtcctgagagctcttttctagatagacactttcacatattttcgcaggactccagcgggccttcaaatttaaagatgaggagtgggaagcatggaagagcaaggcttcaaagaaatagaaagatgatgacctacttcttggcttgttagaagaagaaaaaaaggaggaaggggcggggcgaggtgagagctttgaaacagaatagattttgcaaatccatttgtccaacagcaaaagaattactgtgtgaaggttggtttcaataaacaactaaacagccttagcagctagggaaatgaatctatagcatgctctcgaatgtttacttggatatcattcatacgaaagcttcaattctatggctagcttgctgtcatcatattctgaagctctaccatcacgaatttggcagatttccagttgtccttgagagaatccagggatcaaacctcacacgaacctagtagtagtattcttccctaatgtgtggcacataattgtctagagtcgcttgacataaatcgtatgtaaaatcgggcaccgacttcatgagttcggcatcaatcacaggagtgcgccctgttcgaagacgcggtaggttggcaactatcatttgaatcgccaattgcctcagcttctggtagttggcttgtgtcgaataaagttcttggatcatttctgcaaaggagtctctttcgagacaatccatgaatgatgcacgaaagtgtccctccgctttgcttttcagatcgccgatcatgaagtaatccgccacgccatacatgcgcacatggaagtaacatggatgacactcagccaatgtatcggccacaagctctacggtgtcccgttgctcggatagggtttcgtcatttggagctgattcatccatggccagttccgttggcaggggagactctatcattggctcgtctgcgtgagcttcatcgtcaacagtctctggggatttaggcgtgcgggatcggaaggtgtagtttcccgtgtataggaattccagcatcttctcgattaggatcgggtcttgttcgtccagatcaatcgggttgtaggtttcctaaaagtcatcaccgcttgtcagttgtggtacgaagaatcgtccacaggattaacttttactaccttgaacccgctagaacaagcccgacgaaaatactctgatctagagcagacgaggagcttatgagcagagaagaccgcatccttgcaaatgatagtcaaatcgctatagtccgagttgaggtggaggctactttagcgttagttcatcgaaccgaatgtcatcctgaattggtgatttctcacctagcaataaggccaagaataatctcctggtctctatataccgaagggtctagatcactcattgtggatgatggtgaagccttatatttcttctttttcgcagccatacggaaaatgaaggtatggatatcttggtgggtttggcagattgtaaagttggatgaccaagatattattctagcgactgatattgtttgctacaagcgcaaatactgatgcaccgctgcctaaccccgcttcctttcattgaaatgctatgttggtttgggcggcaactatccctgccacagttgtaccctaggcggcgaagcctgcgactcctgctgaggtgcatgactctaggatccgctggttttaacttggtgaaggacatataaaacaacggtcacagcaatctctcacctcgataaccaacagctctcgtttccttttcaacctgacaacacaatcatcacaatggcaaccaaaaatctccagtccagtgaccatcgcgacctacttgatattatcgacaaactcagattgcaagggattacccgttgggtcgaccttccagagatcatcgtttgcggcgatcagtcttccgggaagagctcagtactcgaggccatctcaggcatgtcctttccgacgaaggacaatctgtgtacccggtttgctaccgagctggtccttcgacggggagaccggacaagcatcgacgtctctctcattccggacccgactcgccctgaagcggaacaggtgcgactccgctcccaaaaattccacctcgaagagcctctcaatcttggaatggtggtgaatactgccgaaagtgtgatggggctggatggcgcgaacaagggcttcagcaccgacatccttcgcatcgagctgtgcggcccgacccaaccacatctgacgttggtggacctgccgggtctgttccgggctgggaacaaagaacagtctgaccaagacgcggaattggtggaagagctggtgatgggctatatgaagcgcccaagaagcatcattatggctgtggtctccgctaagagcgacttcgctttacagtcggtcaccaagcttgctcgacaactggatacccatggcgaccgcaccttgggcctgataaccaagccggacacactggatgttgggtcagacagcgagcgcgcctatgtggaactagccaagaacaatgacgtgagattcggacttgggtggcatgttctgaagaatcgggattatgccatgcgcgatgccagctctgctgagagagataaagccgaggaagaattcctgtccagtggtgtctggacagaactggagtcaaatcaacttggtgcgaaaactttgggaccacgactaagtaacgtcctcattgaccatatcattctctatctttctgctatccagtgcgacgttgaatcaggcatacttggctgcaataccatccttgacaagcttggggcctcgcgggccaccttgtctgatcagagaagataccttggcaaggttggacaagacttttcgatgctcatgcaagctgccgtcaacggcgaatattcgtattattcgttcttcggagacagccgctctgatgagagttaccacaggcgtcttcgtgccgttgtccagactactttgacctccttcgaggggcagatgcgcaaagaaggcaaggcgcgagtcattttcgatgaagaatcagatgataatgagtcggacgagccagaaagacaagagaatttgtgtatgatctcacgatctgactacgtggaagaagtcaagagtctgatgagacgcaaccgcggtcgtgaactgcctggcacctggaaccccatgattattgcggagttgttcagagatcaatgtcagccatggaagaatatagtcggtggatgcatcgctgggatcattcgagctgttcatcaagtcatcaacgacatcctcgagcaggtttctgtcggcaagaccacggaacgcatacgtcgagatatcatcaacccgaagatggaaatgctggtgcagaatctccaagagaaggttaccgagatcctcaatccgcattactcagggcaccctatcacctacaatcattacttgacgactactgtccaggaagtgcaaaagcagcgatatctcaaatcagtcgaggcagctttaaggacctccgatgctattcgaaaggagaaccgtcatatcagcaagattaattatagttctctggctaggtccgtggctcaatacaccgagcaagatatggagcgagttgccagcttgcaagccgtcgactacatggaggcatattacaaggtgactttatttttcttttcctctctgactataatatatccgtctcgctcctttcgtgattttagtatatgcctacgcatactctcaaaccgccaaggactgttgttaataattcttggatacctaggttgccctgaagaacgtgatcgacaacgttggagctctggtcgtggaagcatgcctgatccagaaattaccgactcttttcatggcggacacggtctacgacatgcaagacaccgacgttcaaggcctcgccagcgagggtaaggaagtagtcgaggagaggacaagagcgatgcagaagcttgaaagacttcaaacctgcctccgggacctgaaacggttcgataagcacggctctgctcattcacggtaggccagcagctttccagactgtctctacggtcagaaggaaagtgaaatgaagcgttaaaatgctaagtcagcaacaatagtttgagaagggtgctgtaaagaagacctcgaacgactcttctgctgaatgtattgagagtgatcgggttctttttttcttttctttttgaacttcaaggtacctttttggtcttcggacaattgatgagttaagccaatggcgagaccactgctcttcttattttcagtcatggcggacacagcaatgcgatgtaattgtataccaaaacagctaatgccctttttgcttgtggaacataggaagtcgaagaccgatcacgtcaggggggaattatgagtaagcggatggattctcccatcgggttgaccctttagtttatttttttcaagaatacaaacacgcacttgcggatttttcctttctatcagaagcaagtagatcagcatcttcagacctagtagccgaggagatgggaattagtctgcgtcttcaagtccttgtagtcccctacacatttccgatataattcatgcatctgaatgaaaattacacttcataaaaagtgctaccagccccaaggtacatatattagaaagaattgatattagacaagcagaccgggaccagaccgactcaagtcatttcaatggatgatagtatagataccaggcaataaatccaggcatacgaccttgagcgctatacagcgtcgtactgagaagtgtttgaaattttgtacatatgcaagaaaatgaatgccgtaaatgctcgattcccccatttcgcctttcgaaaccaagacgcctataatgcaggcaaataactgccctcgctaaacctcgtcaacttcgcaattatgaatacaggccattgtctaagaaagacacccaacagacatggacgccgagatggccattcgcttatcgaaatgcatgttgtttcaagtgacgccaggaaccgacaacccggtgctcgatgcctggggttggtgtgttgcttcggccggcgaaatcatccgtcccagaatgaagctgacctttgctaaaagctactgatcgtcgtaacttctcttggcggacagccgtacggcgttgagctcggagttcttcgatacgaccttgtccgacgcggtgcttacgtacgaaacattcatccatcaacgtgttggcatccaacagttttttggggatggtttggacgatctggaatgcctccatggggtctgtgacggcgagtatgtccttttcgcatgctttaaagattgccaaagacacacggaagaaggtcttggagccctcatagaagaagacatcccaaactcggagagtagtttcaagaggtaaacttccgatgaaaaccgacataagccagttggtcagtcccagggttatgtccggcagccgagaattcactgtcaatggaggcattttgccccgtccggacggggttccacccatggaagcgatcttggaatagatgcccggcatggtgtccctgagcaggaccatgagaatccagaggtcaatgttcgcgccttccagactaatttcatgggttccaggcaagtagtctgcggcgataatatgcaacatccagaatgctttttcctcagggaggaagagaaggagcattccggtgatgaaattcagagattgagtatatccgattttcgggttgtgcagcgcataagcatacagaacccgacgtagagactgaatcatctgcgtttctgtagtgacattagaataactcggattgctgctcccggactgttctgcttcctgggtcacctccggtttgaaatggaggttgtcggggaatgtgcggtggagatcacgctcgatgtgctccttgtcgtcgttactcggtgaggtcatggccttcgcaacgagttcatcatactggccaaagttccggttcaaatgctcgtacccgccggcgtaatagaaccaagccgcacctcggaactctggaggaattcctttgcgaacaaatcgcttgactttcgaagactgcggcggaaatattgtgggctctgatatgggaagcccatgttccttgagcaattcacaccatttggctctccgttgcgtcacatggctggagtaggatcctttccaggtctcgtattcatccagggtcacatattgggtagctttgcgaaatccgtaaccgtctcgagggccatctccagagcaaagttgcggcggcactaatcccggaataaaaacttttgtcgagggctgtcgttggtgtgtatgatgcacatcagctgccggcgatgttgggggggtgctatcggagggagcgatatcggagggggtgagatcgcgcggagagtctggcggaacagggtccgacgggtcgggttcaggtggatgttctgggagtgcaggttctaatggtgtgaactctggaggcgattctggaagtatgggcggtatggggttgggttcggaataagccatgtttggcaaaaacaatgagtctggccttgcatcttgagaactgggaaaatgtggcatcgaggatgccggaggaacgtcgctcagcgacggatattctagcggttgtaattcatgtaggttcgaatcgcgtgacggcgggggcgttgctgatggcgctttactccccgcgtgggatttcggcgagccaggctcttcggtcacgtcgctgaagccatcaagatacatggaaatcgcgtcttcgacactcatcccattgtcgtctccataaggcgtatcaggggtatccggtgaaagatcggtgatcgagctgctcttggttaggacactgctgcgctctgttccgcttgcttgttcggcgctcgagcgccaggtttccgaattgacacttggtcgggactgattctcttcggtaggcccgtttgttgggaagcctgtcatggaaatttcctgggggctcatgtcctgaaagcggcgctccatagattcctgcgtccttgggcgcctattattcaacctagaagttgacatggatatacggagaccccctcgggctggcatagctttccgatgcactgcccgttcgaggtcatctcgctcgggccagttcggggaataggtttcaggtggtgtggcgtaagctcgagtgcgaccggcagttctaggggttttccattcgcccctcgtcccgtgagaggggccatagtgaggcggagtgagtggccacgggttgtcatgataattgtgaggccgccgctgaggcgaacgcgatctatggcgaattgcagagcggggggagtgaggtgaggatctcggagcgggatttgcggttcgcgggcgtgggtcgactaaagactccaattgaagagggtgaggaactctgcgccggccgggaaggtcgaaatcagccgagggaggcggatagcgagggtttacgtttcctgtgaccatggccacgatgtcgcacccagttcccgctggacatttgttatcgctgaaggagagctatcgatcgataaccagaaagcattcggaccggaaaaagggagattctcaacaaaagggagtgcgaaagcgctagagaatgaatgaggaatttggagaaacgaaagacacgaagtgagaggccaaattcgggagacacagcctgccagaggactgtggataaaagaagagagaaaaggcgcagttgaaacaaaatcaacaaagccttgatcaggtttagggtcaggtgacgtaatatggacaaaggggcatattgactacaaagcacaaagtatggaggatatagagtggattgaccgttagatatgtactctagaatggtatttgattattctacaacattcgcattgttggaatctttgtataaaactcgataggtcagaaatccatgtgtcgatcaggaactctgggctttaatagtcgcatgttgtatattttatacagcacttgacgccttacgccagctatatgcttcttatttcttagctcaaacaccattaaggggggaagatccgagaaggtatctaaatagacctaagaactaccaaaaaagacacaaaactgcatacggagtcagctgaactcttgttctattttcctacggagtacttagcccctgaattccagaccaatcaaatatcgcaaattaatatttcgactcctcttttgacaactcctaattcatctgcgtatggccgtggaatgttaggccgctcgaacccttccgtcttcggatagcggatgtcaactgtcaactatttcaaattgagctcacattgacgtttccgtattaatttcaagagtctatttctcgcaatgtctccccggaagaaggcatgatttgcgaaccgcacttatgtatatgtgccaggggagctgcagctgcattatactattgaccagtaccagcaatgaacccgtttgcccaatatggctattgtcgacaagcaatcagcgtcttacatccgtccgagtagctgggcagatgtaagtattattaaaatccccactgtggaactgtcattgactaacatgcttttatagggtctgcgaggaattgccgcagtttttgtggtcgcgagccatacctgtctatcctttgcgacatatctgatcccgccatctttcgcggaaacaggaaagtctattttgtttcagcggccgttctttagactagtcatacagggccaggcttgggtagctatcttcatggtgctactcgggttcgtgaatgccttaaaaccgcttcagctagctcgacggggagctacaagcgatgctcttgctacactctcgacaggcgccttccggcgcaagtggagactggtcttccccgctgctctgatgacaattctagcttggctgttgtgtcagtttggtgtctaccaattgggtagaagggtagatgcatactggctcagagcgacaagcccccaacaaagtccatctttgaaaactgccgtcgtggatctgatgcgagagatagtggggacttggatgtacggagaaaatgcctacgaccaaccccaatgggcactactaccccttttccgtggctccctatatgtattcatgaccctgttggctctggtaaacactacaccactgttccgcctctgtgcgcaaatggtcctatacacctatagttgggcaactctggatggtatgtttgggaataatatcgcggtactgaataccccgctaatcatttcttacaggtactgttggtacaaatattttcgctggcatgatactagcggaactatcattatacaacctgatggccctccggccacgtctgctcttcaaattactaccctacgggctagtcaccctaggcctgtacatctgctcgtacccagatcaatacgccgatcaaaccagatggtcttcccagcttgcatcgcttgccgaaatcatcttcccacaagatgccaacgtcagccgctactacgccagccttggggcgcagatgatatgtcttggcgtgatgctttcttcctccatgcgccggatgctctcccatcccgtgctgatgtggcttgggtcgatcagcttcccgctatatcttatccacggaccgttaatgcgatctgttctggtttacctgctgtatcttcccatggcaattggctttgagccggctttaagggcagatggaacaccagatccggagtcttatattccaacgccgagcccattccgacttgggtttattctggttatattttttatgttcttactctatgttgttcagcagtggtcgaagcatatagagccgaagatgggtgcacttacagctgcgcttgagagattctcccgttcatggggtaagagtgcggcgtggacttcgaaagagaagggagagaccttgcctattgcgtctgtacgggagttaaatgtatagaatttttattgggataattattgtgccttggcgtttggggtcgctgacatttggacttactaaagcaatatatgaattgaacctttctaaacgagacgttcgagatttacaacgtttgcaaagtggttagcagctatataataaggctgcttcccactcttgaacttgcattctcgcaaatattttatcactggcgcagtttataacgacagtaaagagtaagaatttctggacaatcgttaagcagaccaaacccagagcaaatttcggcaaagggccgagaatacccgacggtctaaacctgcgcgttctgttctgcggcgcggatatcggaatccttcccccggtgctcgtcatttcttatgacaatctggggagaccttatcgattcagggagtaaaaatccccctttaacaattgcttattgagatatatcagatttgggatcgacgagcttggtacagatcacttggaaattctggaatacaaccgcccagctcgactcatctgtcggccgtccaagacagaggacagatcctgacaacccatctgcaggactgaacagttccttcgttttccataaaagtgacgtactctgtgaatacgtagtgcggtcacataggtactgggtacctataaccgttgcgtttctaatcacattagggtcaacgggttcttcaagaagaagctacctcttaacgactgtattcattcgaattaggtagacatcagacccagcgagagcagcggagtataacgcctattccgacacagcgggatagccaggcgggctgataagttgaggtgaatcatcgtccataatgaggctaaggtcatgccgatagccagcgggaatggtttggatcgtcatatgtataggacaaagtaccaatatatatgaataagtcggagcccttagcagtaagcacgggaaaaaggaagccacttactctcttcttctccgttgcaagccaaacctctttcccgtacttgtgaatccgttcctgttgtgcgttagcaactcaggtctaaaatcagcctcaggtctaaaatcagcatgatagaaaagtgaaattcatctcacttggtagaagcctgggagataatgtctgagaatggggggaggaggtatcgaggtcggtttctgggatagggcaggcgattgtaccgtctggggcgtttcgctgacgacggggtactatgacccacaattgcctagaccccaccgtcgtcttgacccgattcggcagtccaggacctgtacagtattctagcaattgcggagcgaagcaaagcaaagcaattaaatcagaagcctcgagtatgtatcacgtgaggggtcttttcgcatggacaaaatcgtaacaaggtgatcggtgagatttggcagagaatgaatacgaactaggcctaatctagttaactatagggagacccctccgcctgattctgcttgattccgccttacacagaaggcatcaattatttctgccagacttaatagagcagttcttgaattagttgctcaaggatggtctatatgataaaagtgactaaattttgttaacggtctctatacaaattgtaggtatctaccgtcttgctgagttcaacaccaaggcggtgtggagggcggtaatctgaatcccgaaaaatcagacggtgggttgggggtcgcattagccaaagggggtccactaactatactccgtaacccttcgcgtactagttacttaccttaggcactttgaatatgtctagaaaaggacgcggtctacaagctaggtctattgttctcagtaaaaaacccgagcttgccgtatttatttcgctttcccacttcatcaaaagacatcctgcattccctacatttacgcaatgtctactatttccgccttgaagcatatagttcgtcgccttattgaacacaagattgacatcaaagacttggaaacaatcctggacaatcctatgccgctcgtagtagactcgttgaccctgcaagatttccagaagatccttagtctcaccatggttgtggataatgagttcgactttattgcgcctgtccccatcccgccagatctcagtatgttagcctggatagtacaaagaaatcagctaacctccactagaactttggctggaaaaattcgaccgcgctcatggcaccagtcgcgatgaagccctcatccgctgcaagctaaacctcctccttgtctgtgctcacgatctagtattgtcgtcttttgagcaaatccgctcgacccattaacatatagatggaacggatatgggcgtatagccctgtgaaatggaaggggaagacatgggtactgtcggggcggccagactacggcatttggtacggagaggaggaagacatcgacttaaacgttgtcatcatggaggccaagaaactggccagtggtaccgtagggattccgcaggcgctggcatatatgggtaagtacatcatggtatcgtcggcataatgcactcttgggctgacctgtcaaaagggtgcgtccacaagcagcgcaaagaacttggcaaggcagacaccactgtctacggaatttccaccgataccattactttcacgttcatgaagctcgacaatgagtctcgggtaagtgtatctaaatcgtgtcagtaaccctgattttaatgtttaccagtggtcattcaaaatggtcggtgtcgttggaaatgggttcgaacaagtgcttggtctgctagtctacctgatggagaaagcagcttcgatatcacctgccgcctctgaacacacgtctcgccggacacaagaagaatcatgggagtctgacctgatcttcgactatgaccctgagatggatgttgagacagatgtcgagacagatgaatggtttggtcccgcattcgtcctctaaccttcttttgcgtcttcctgctcttctttgctggtcgttcttccgtcttgatatccttcttcgttagttgactacctagttcccgcggacctacttggggaactatataagtaggccactcccccgagtcagacaatctttcatatatatttcaggatatcgcgaaatgtcctgacttgtaaaaatgtctcgcaaaaaggtctaattaactgctttcgcctctttgaatcaggaatggagagacccatccgattctcaattcagcatttgaagcaagataccccggctactattgatgatgggcagtacaaggtcctcaggccaagggtggttttgaattcggcaacaaacaaccagggacaagagtttggtacttcgtcgggtgtccttgttcaagacacaggtggttataggtacatggcagctgcctcacatggattctctgtagaggggaaggtttatctccctagtgcctctggtcttaaaagagaacgtatcattgaacttacgcataccgatattgcgctcacgacagggtgcagtttgtgaatgaaccattggccctagttaaatatatagatgctgttcttacatacaagagcgcaaatatccaaaatgttgattgatgttgaatccttgattacttactgctcttgccacagtgcatgggtcgggggcattatgcctttaataattggcactagactattcatccgtatgggtttggtgaggaacaaatccataccagacccagtcgcgtcgcgttgcgtgtcggcttgtgcaacgccagtcaaggcagcaatcgtgacacggggtttggtttccagtgttttctcatactcccggattcgcctagtagattccaggccatccatgactggcatggagatatctgtgaagattattagattgacaatgcccgcgttaatgtttaaaaggcctacccataaaaatcattccaacggcagaggaattcgccttgaaaacctcgagggcttcttctccgttttgcgcaatgacataatcgcaattcagcttcttcatgaaggcaataagaattctgagattgatctcattatcatccacaagaagaacggttgttggagtggttgatatggggctattttcttttttgatgggtgtatcgtggctcgtggtggcgacttcttcggatggaaaaagatagtcgtcaacattctcccgacagagtctcaaagattcgagctttgctgtgttggcccgggtatgtgtttttggatctgctatcacttgggtcgtggattggtcactaccatgaccgtttgacgacgggctaagaagcgagtccatctcaggctcatcggtgctgatgtcggctccgaagctccctgagccacccggtctgcattcttcgcctcggagagaatcaaaccgcacctgctggcggttgatacacgattgtaatgcttttgccaacttgcgcggaccgcatggctggctaatgaactcgagcacatttgtatcgccacgatttcgagctccgactgacatcgagtgcgcgaccctcggggacgggcatattacgatgaccggcgaagggattttaacacctggactaggtgcaatagccctgatctcctgattccctatatccagatattcgtgagaagatatgtataagtcacagtgggcgaattgtgtttgtgaagccccaactaaaagaacttccatggagaagcaatctgcacacagcctttgtaacgatgtgcatagagctgtgtctaattcagaagtcccgaagcctaatattccaatggtcttcccgcatgcaagagatttcgctgtggtgatgagagactgattgttcaacttgtcaagattgtccaaagcagacgcttgattaagaatcacagttgccacgacttcagtgccaacattcttcttggagttgacctggatgtcaccgccaagggatgcgagtaatcgttgtgtgatgcttaatccaagaccattgccggttgtcatgctatcttcctgtgagaaagcagtgaatagtccatttttcaaaaattccgggtcaatcccagatccagtgtccttgacagtcacggtgactgttgagcttgtggcgtcgccgctttttccaaaattcactggagaggccttcatggagatgtagatataccccttgtgagtgaatttcaaggcattcccgaagatgttggtgaggataacattccaggccccagcttgtgtcaaaaatttccaactgtgggtgcggtcaatatccaagatcacctggactccaccccgtgtatcggaatgtttgctaccgaagatagaagcgccggcaataccccgaaggggagatcttgaacagctgaagaaggaataaccagcgaagaccgtttcaactgcgtcttctaagatagcatcaagttcgacacaggtgtcgacatcatttgttgaatgcaaaggagggcgggctgcggtaattttcgggttgacagaaattttaggaaaacgaccaccggggagtttggcgacagagtttggtcgaacatcattgatactagcatgctcgaggagttgattgatggagcctagtagtgtgtatgcacaagaggagattgtatgaacaaatcctcgttgtagcgcgtccatggcggtgtcatttaatagttctgccgttccgaaaatcccatgcagaggcgaccgaagttcatgactcagtccggagagcaagtctgatgttgctcgatcggcgaaatgagcgccgagtcgatgcacctccgccatgacgctagttccaaatgtcaagaggaatgctagctcatcattcgaagtgaagacacggtggtgttcttttgtccacgccagagcccccgagtaccatctatccttgtgcgaatcccataaaggtgagaatatgatgcttcgggattctggggcaattcgaagcaagctctgggcatcctggcgcacgagtgactttcgtgttcttttgtacctattgcccccgggacgtcgcaaaaatcggttgaccactccatcactggtatcatcagacgatattgtcccatcttcactaaaattgaagatcttcccttggggatatcggtgcaaaaggcccccgaggaatgactccgacaatgcgattttgttatcgtccaacgactgaccattgatgctagagacatccgaattggcaaatccgagtatttcgcacgggttcaaagtagttttgcctgagttttccgcttgttctggatcagaaaagatctgatcttcgaatgaaggttgcggggagcttcggaatgtggcctcatcacccgaagaacagctctcaaacccactgccttcagtatcagactctgcattgtccactaaagcttcctgggagcggaaattggcgttgaaaaagacaactgcctcaacttcgatactctcgcggacgagattggctgcacgtccaaatgtttcattcactttagcagtataatcatccttcagtgatgtctggctttgatcactgccagttgtcatagccgcttgggaagtttcttcgagttttggtagagccttgtcatctctcttggtagtcgagttgaatgaatgatatttctccctatacccttgcggggtcttttttctagggaaatgaagattgtatggacgggaagacaggtggcttggcatgccattctgagccacggtctgagtgacatcattcaagacctgcttttcttgctgttcacgattgacatgcccttctgcatggtccattccatcaaacatggggtgagaggcgtcagcgtcgagaacccatgacttgcgcagactaccctttccctccaaaaaacttccaaggccaaccatcatgcgctcactgcggaaacgttgggctttggagtgactagttcccagatagtccatgacggtagctgcgatatcgaccaggaattggagtgtctcaccgcccaggggctcgggctcgtgaggttgatcgtctaagatcgtataggctccaatcaccacacctttcggactgatgataggactcgatgcgaggaaccgaatgtttggaaatgaagtcacatctggatgatccttgaatgcattatctttggtaagatcgggcacaaccaagactccgtccctggcatttgacggatttggcgtagaatgcataaccgatttacacaggctgcggtcataagacatagtacaacacccgacccaaagctcgtctcgcgcattatgctcgccatcattctgcaagctcagggttcgagtggcttcggtgagaacgtgttgctcgtttcggccgaaaagcgagatcaacgcacgctgcgcatctagtcgcaaggtgcccaattgggcgaatgccgtcaggacagggtcatctgaggatcgagcaacatgttcttttgatagtgtagcaggcccgacgtgttggagggcgtgtggtttgagatggtagggcggtaaatacctaggaaacaaggtgtatggttagcctacagggtcttcggtcgagtgttatatagatcacaagaccgatgtatgagtacaatgttgcgtttacaaacaaaggtggtatattacttatagaattctcgctctctggatgtgccaaacttgacctgatacttctgagcgtgtggtgatgtgattggacgtgacattgcgccggcggcagttctgatatattgaatgcaataatgctaaaaagacagaatgtatgcttcgcccttggaatagcttggcggatcatcaagaaggctgcaccgggctctcggacttcagaaaatgagtagaaaaagaaagaaagtgagcggggcggccagacgagcttgcagcccgcaagcttccaatcttagacggctgagactttcggggttccgagattgggctcggcctagccaatagattagataagcggtgacatgggacgggaatgtttggcagaagacagccaatcagaggtgaacccgacatttaagtctatctcggctatgctctgtcattggtccaatcgggattgcaagatacgtccacgggttacaagccagtagatgagatcatgaagcaaaatatgatatgtagaaggagagtagaccaagactgtaagagtctactattacgagatggaattacagcccccagggtccttgagttctgcttctaaaggcgcttccaaggttctttatttagcatggcgaaattaccaaagagaagcgtggcaaaattagaacataactagcgattagttatgtcttcaacgcttatataataatgcatgcagctgtttaactagttagttaccatgctaaccgctggatgaggtactaacttgatcttaacttcgattgagggctgcaaaagaaagttgaagctgtgcaattctagaacataaattcaaaaaaagaaagatttattgacttgacatgaaagttgttcctatctgctataacaatcggcaatgcttcaggtagggggttgccaatcttatcccgaagatagctgtcgataacagccaggaaaatgcaagggggagactccttcatatgatgcgctcgagtatcgcgcatagaaatatcatacatgccgacatcccgggcgagaaccttgagggcttggaccaaaaataacctcggctagatttacagtctaattacgatactaacagatataacgcacaccattataattcacacctcgtttaaaggctctgatattcaattgctagctaaaagacagccgtcaaggtcaggccaacccatgctatttgacatcaaacaccgaagatcagaccaaacaaacatacccactgccaattccagcggagcccttatctccatacatctctcacagtcgaacattctagctatcgcaagacgaaacacggaagctacccatgttcctgctcaaagtgtggtcattccagtcatcagatgcaattccaatctggttgctgcaagacttgtcgctgtagacacgaagaacacaatcggaccacaagttgttctcccagtcaatagtgtcaccgcttttgcaggaggacttagtgcagcccttgttgtcttcgctgtcccactgcccgctgcaggtggtgaagatccaggcgttggccataggaaggatggcggcgatggcggcgatggtggtggtggtgaacttcattttgtttcgaagttgatggtcgggtttgagtggttgaaatacttaagtagggagttgaaaatagatgtggattgaatctttggtatcagaattgagatggagatttgattgtatctgaggggatgtcaggagcgtaaaagcaagggcaagtggttatttatatagctttctaggtggtatcgagtcttctattgataaattgaaatatgtaacttcatcgatgcaatacgagtgctaggcacaatacgagcatttgccagtgaagccgaaatagaaaacacgagagatcagcatcgtcaacggggccatgattccaatctccagggtcaaatacgataactattaccatcttcagtggatgatacaggtgattggtaggtacctagggagtccactgtctatagggcggaggtggtgaggtagcgatgtcgatcagaagtgaacatcgctctatttagggctagaaaaatgaccggggaatagatcatctatagcttctcgtattctcattttgaaactcatctactcaaagcagaagatattatttttggatgacctttataccatgctgccactcgcccaatacagacctgcaattgataggaggactaggttaacatattatgtctaggaaaaatcgttatcgtgaagatatttttcttcaagctcaagtatgatccagggtctatttatggatgtggtgctaacccccgcataaatgatcgacagggtccaaggcccaatatgcccggacaatccatgtcatatattttaagccaagactcgggttcagcctgcttctcttggcatctcgtgttcgtggagctacaggaatacgaaacgtaacacaacttaagaaatacctagtatgacgcacttggcatgtctgtcactaaaaataaaaagaataagcagcaacagggacagcagatcttcctgctgaatctttacaacaaaagagtgcattcaaacgagattattaagtacggggagagaaagaaaaaagaagggaagaggaccggggctgtaaggttattgtgtgtcccttttgcaaaccatgcaaatccttaatgcgctcgctttgttccatacgaggaaggaaccaacaatccttcagatcgtaacaagccggaagtccttaatagtctatgccaaattcaacgtcgctttacctctcatggatttaccgaaccggtaaaatatcacgggcattgggatcatagccagagtaacaaagcccagtaaagaatttccccacccataacccagcgcctggtacatgtagggaccagccaggggtagcaacgcgccgaacaaagagcgactcacggtaatggctgcgactgcagatgctgcatatcgtgggtatgaatcaatgacgtaggtctgcaaagtcccaaaaatacccaccatcccaaatgcgaatgggaaaagcccaattataggaacaatccaatgcgtgtgcgcttgaaccgaccatccgtaccaaaaaaatgatattggaatgaaaaaggcgaagaatatcgataaggggagacgcatttctggttcaaaactgccattgttgcggctcttaagtcgcagaatgattttatcactcagcagagcaaagagacattgcccacagaaaaagccgagaccaagcccaatgtatgacagtccactgatttgaatactccagccataggtattctggaaaacattggtcactgtggtgaagagaaggtagaggcagccgtaaaccgtggcgatatacaaagcaatgatcgacacgataggggagcggaaaagaagctgaagaggggtttttaacccatttctgaggcgatccatttgctttctttgaggacccccctttttttcataacaactgtaaagatcaggtcgttgaagctctgatcgcaatgagtctgtcttgcgctgcatgatgataattgggtttgtttcgcgattgaaaatcgctacaagagttgccactgtgccacccacaattaaaagaacccagaagacctattttggttaatttccatcttttgagtagtcaaggaagtctactaacccatcgccatccggcgccgtgggcaatgaacccaccacaaattggaccaagcactggcccgaacaatggcccaaaggaaaatattgacattgcgagtcctcgctgctctgctgcgaataaatccgagacaacaccaccgccaatggtcaagcatgcagaaccgccaataccggtgaggagacggaagacaatcaatgcagacagattcggggcaagggcacagccaatttggaaaaccacgaagaaacaatttgcgacgctgagtacaattctccgtccgtaaatctcgcttagcggggaaaaaagcaaaggtccgctctgcgctctttgttaggtcaatgtcatccagagagcgcccaggaccgtaatatacttactccatatccaaatagatagcctgtcacggccaatgactcacgaagcgaagacttattgccgaactctttacttgcgtctgcaacggctggagcgaaaacagatgatgcaaatgggcttcgaggtaggtggtcaggataatggacgtataattaaagttggaagaatattgcatacctaatcaatgtaatgatgctgacgagtgagagaaggaaccactttcgtgtagcagggtaatttctgtatgaccaattagatcttaacagctgtgggataacgtaaattggacgtaccttgggttgagagggtcatcttggctatcccacccaactatgccggtttcaagatttgttagggggaactgctcccgcttgatagtcggattcacctgattcaaaccagccaatcagtaaaatcaacgagaaaattgcatagagcagataaaatcactttagcgttctccatactgattactatcagttgtcgattgcgattttgtggactcacaactgtcgagatacaggatttcacaaatcttccgtagacaaaaggagtatctgaataggtgacatatatataagataaaaatttaccatttcaaacaatataccattttcggaaaacaaatggaatcggacttaaaatacgggctaacctaaaaagcggactccggggaagtcttgggccgattgaagaatgcatgggctttgccactaccaacgtgccgcctcagccgagtgcgacagagtgcacgatgaccatggatcgctatatttctaattcccggctaatttgtcttttgagtatagttcctgtgcgtgcctaccacgactagttccagacttgtcgagatatctagaccactatgatttggacgaagctattattcggaaaagaacgtggaactagcatcgactttctccagtgatactgaatgctgtgctgattagccatgagcggtatttataagtacatcggtttcgttaactacctctcgtctattctaatttgacattggcaatataacctatatgttcatcgcagatacaacttgagtaactagcaacatggtttaatcaaatgaagacgaagagttacaatggaaaaaccaccctcccgtttcctccagcacaaaatctgatcagatgcgaggtcttatgattcgagaatggtgacgaggtacagaagtccatcacagatgcacattgaagaaatcggcaatttgttcatacctggcgaagttattaacgataaattgcgcgcgttagaatcatcttgcttacccccttgtgaactccttggaattctgctcattttccatgttcgcacgagatcccatccacccatggaacattgtttcgtatagttcaaattcaacatcaacattagcgcgcatggcttgctcatattctttcaaaacatcggcttgctcttccggggacgataggcagatgtgggggatgttggtggctttagcgtccgcaatatcaagaaggctgaagcagaacatatcaatactgaagaccaaaccagaccacaagagactcacgatgggtgggcttggccagaaaccttaaaataactccgaccaccagaagccaaagcagcaagctgtccaatacatcagtaaatttttatcgtcgtgggataggttttatccataacctacctttcctccccagcacagtccaagaacaccccaactcttgacttgggggtacaaatcctcgctttgcttcatgatatccagaagagtagataggtttttttccgggctagcattctccccaaagaaggtcatcatgttgtttcgcttctcctcggtgtccatggcgacccaatccatgctagctgccttgcctctaaagaaatccggaattatcacgagacattccagcttttgtgcgaggatagaggccccttgtatagtctgcgggtaaagaccgaaaatgtcatacacgagcatcactccacgttcagatgaacggtcacccacgatatctgccaatttggtttcccgaattagctacccatatgatttctttgcttccttcatattggactcacgcaaacggacttccgcagctacatcagtgccttgctcggtagatatgaccggctttccaatggcgggtgttgaacagcatgatttggaggacattttgggtctttgtaactcagcttcctgtctggctaacgaaccggacaaatcgagcattcagtgttgggactctatcgtgggaggcactaggaggtttatataagtgtcacagcaagtatccatttgaaccgcttcgtcatttgtccgtgcgcaaagtctcggtattaccggacttaaagggaatcgaaagtctgccggactctacaaagcattcgttttgtaactacatttagttcaagagctatgtgtagtcgacatgtcccttgctcaataccagaccgtgcatcactttgatgggggtctctcaccttctcatcacccaagaatgcatcctgaatagtgggatagatatttttctattttggagcatcgatttcagacgattgtctttcaaacatgacccttgaggaaactctattgacgccaagaattgagctcggaccgccatgaaacggcgctaacccaaaaaccggacttagatagcacgtcgggattttgagtctcggacgcacttgcaaattacaccgtgaattagcgctatcccaaaaagaaactgggcaagacattgactgtgaataggcgataatattcccatcgcttaataggccaagtaagtagtaatacgaatggtgaaaaagagtatttgttgaaatatcagaaaacctatgctacttgtattcttaaaggctcataatcaatccaggaagaggtttcagtattgtggcattcttcaaaagcccgtgccctgaaatgcggccgcttattgccgagtccgtcgcatgtctgagatgaacagctttgtgtataagacttgatccggatcctcgcgatagaagagcattgccattttatctcttctggccagcccttccattcatctgatccacctgatctgacctgttcgcactttcagggacaatcaagccgaaacataatgcaaaatgttctttttttcttcattgaagtcgcattctgtatggtgaccatcgtgtcagctcagatcccagagtcggacaccgttttacaagtgcagtacgggagtgtcacgtttaagaccggagagaagctgaggttaagtggtatggaatagtaacaaggcagaagaaagaccagacgaagctgatagagccgatcttattccagacattacatcagcccccagtattggtctctcagcacctgccctgacaggcacgtatattgtcatcatggtaccgccttcctgtccctattatacccatccacttcctcgacttaactcaactcagatcgatcccgacgcacctgaccccacacttcccatcttcactcaggttcttcactgggtacagcaggaccttatcttctcgccaatggccggaaaatacaatacattcgttccccttattactccgtcacccgcacccgctgccgctccgtacctaccgcctatgccaccaccactcttagctccacataggtacatccaaaccctattcagacaacctgctgagttctcaataaatgacctcgatctctacctggccgactctatcttgagatttggatttaacttatccagatttgcccaggaaaatatgttgggggagcctattgcatcaaatttcttcttagcgggagacgagactatccaaatcaggtgatagacttgctgaaataattcaaactgcgagtttcccatatttgccttgtttatcggtccttgggttggtccccggtctgaatagccccttacttaagcgtcaatggaaccggaatcatttacacatgccgtaggcaccctaggcaattctaaattagattaggaggaatattaacgccagtaaatccgcaatatccgctataaagatgggttttccaaacccaactgacgattaataaccaaaacatgataaccaagtccaattcgattcgcgacagtctcgtaaaactggagtgggtctatacatcggccacgctaacccaaaatacggggtttacttactccaagggtgaagaacttggcggctgttttcctaaagccgcatgcttaactccgggaggcagtttcctgatctggtgcagattaaggtctagtctatgtcgttcggattagacctcgtatgtaggccttgctgagatggaattatccccccggtatcagatcaaaatgagtcgttttcttacacagagtttaaggcttccgtagacgtaaatgaagtgtgcataagaaaagggatgcaacggatgtgccgtgcttgccatattccggttgtcacgtgatagtatctgagataatgacgccttggggtggcaggaggtggccttttcagcttcatgaatgcccagtacgattaccagccatcgcataggcggcccttttccccctgaaattatggctacccacagctttcaactgcgtggaaatttcggccttggtggaccgtctctgtcaagcaactcttccgagaacacccaccaacagaagcagtctcggcctggaggatacgaggctaacacatctcccacaaatcctgatatccagcacatgtcagtccaaacaaccagtaaaaaggtctcttgtacctcctgccgacaacgtaaaatcaagtgtgacaaagaaaatccatgcagccaatgcacatcctcattttacggtaggacgcaatttccataccaaaacaaaacattgcattgcactgggaaaacactgatactgaaactttgaagattgcatataccccgaatcttcacgtaaacgacggcggaaactccctttggagcgaatagagtcacttgaatccagactgaaagcgatagaatcatccatctcaacgaacgcggaaagttcccccatgattcctagtcccattacatcggaaattgggaatattacgaataagactcctctggctacaccaaacgaacataccgcgcccgcagagcttgggaatcgtgataaagtataccacgccgttgaacaggatgaaatcgagtttcaagggtattctgcggatcgatcttttattcagtgtctaaatgcgaagctaggtgactggcgtggcggtgatatgacttggcaacagctcccctctcgtatatcagcgccagcattctttgaagtcgagggtcgaactcccgctcgagtcactttacctgaaagagatatcgcagccaggctggtcgacgcagctttggatgcacagatactactctgccttgtacaccgaccaagctttgaggtttctttcaacttggtctattcgcttgaagaagccaactacagtgccaaagagcagaaatttctaccgcttctctatgccatatttgcgtatgggtgcctggtcatagaccccggctcgtacggtcccgattgtgataaaaaggtgtctcaggggtattgatttccaaagttttcccgtattcttgctcaggctcttacataaagcaggttggaattctacgcaaagagtcgacaactccagaatcttgccgagtgcagagatttaacatctctccaagccatcatgtttttgaacctctttcttctttcgtccaaccgaatatcgacgtgctatacatatctcagtgcctcattatcgattgcgctacgcatgggtctccaccggtctctcaaaaggggtcaggatttaatttcccaggaaatgagcaagaggatattttggacgctgaggcttcttgtcaatgacgttgccaccgcaagcggtatgcctgttcttctgagcgatgatgaaattgaccaagagcttccaaaagagacaaatgacataaatattgaaaagatgaggatttctccacagccgcgcggtgagatatgctatatatccggtgcgaattcatacaagcgactacaaatggttagggacaaggtgacccactgtgtctactctctcaaaggccagaccacgtctgatatgaatggtttaccaattcatggtgtgagcttggcattgatacacggaatacagggtgaccttgacaattgggtggatgatatacctatgggttatcgtcttgggacctgttacaccgaagccagattgataaggtaggaaatttggacatcatccttcacttgcgagagagcttgctgatgactcccagggcccaatttattctagctatgtcatatgctcatgttcagctctatctctatcggcccttcttgcattatgctgtgagatctctcaacgagcaggttggtatgtcaacttatgcgactgcatcggttcgggctagtgaaaatattatcgccctgtgtgaagggatgtatggacaagatctcctcaagggtgatttgtggcctgtgacgcacatgttgacaagctctattctgacaattttgtattttgttgtggtttctcgagcctcgcctaaaacagacatgcttcttgggagcttgatagctgggcgaagagttctaaatcaccttgctgaacatagtcttttcgccaatcgaggtaaagtcatgctgacggtgagcattaatcagcctgtggctccttttgtcgctgttcactaacatgtacaataaagatcatgatctccaccctcccgggaactcttcgacatatccaagaaaagcttcttcgctcggatacccaagaactccccgggcttcaaaatgagaggcttgcgagctattcaggtccttttgataatgcactcaattcccggctggcgtctgaaaccttctcgctgtctccaaaacaaagtcctgtcggctcattgccagcctctaccgccgctgagtggggagcaaaccctagtaaatccctcaattcatcaactgtgctcagtgatagccaatggaatcccagggtttcaaatgcacaacattcgacaatcggtactttccagcaagacttggctggaacatcggaattttgcaaagctcatgattcctcgaatgaatcaaatagccatccgattattggggaagaccagacctatcctcgaagtcagaacttggaagagatgggagttatagacgaattccttcaagctcagccgttgaatcttcaacaagactgtattgatgagacttggttcagcgctttgaagatggctggcttggattgttcagatgactttcagagttctatttcacgcttggaatgtttagagcagactttcgatttcgatggctgattatggcgcaatagcattatccccagagttaggggacgagcaattgggcattcttttctccggcggataagaggggagtcgaattacggcgaagtctttggcgatggttttggggttggggcttcgcaattgtcccttcatatgcctcggggcttaatgggatcagcttgtgtagtagattcccacggattaccacaccaaagatccagaattagggattacacattgttactcaactcacggcgccttgccggcagttggaatattggcttgattatccacatgtatgggcgacggatcggaccactacgacaaaactaatttttggctcaccgctctaatcaccgcctgtatgattatggtcttgggcctgtatataatattgcaacctccatcaattaacattgtaccttttgaagagtagattacctctctctataatggcagcactatatctgagagaggggagtgtactatgtgaagaatgcgtatgctctggaaaatatcaatttgcgtagggagaagatggtggtatgtatgtatgtatctggtcgacaattaataagaaaaccaagttaagaataactacacagaatgtattaatttgtataatacaaaggcggaaactccagcggtgaaaataatatatgtattactaagcatattccagtttggcccatttcggctgccctagaaattcttgacacgaagattccgaacataatctacgttacttagcgtgatcgctggaatcgtgactacgtttactggatcctcgtttgaaccttccgacctcacaatgcctgcactgctctgtttaaaaacaatcccatcacgtggcatccgcttccgatttggcgacgttatccccacctcccgacctcgcaatccttggtaatattatatggagacactttagagtacgtagcgacttccgtacatcaagccaattcatgtcgcacattgcttgaaagtgtggtagcagcttcttcgtgcaattccgcaataccattattgggtacctcttgaattagccccccgtgcacttgatcagtaacagtgctatggccatacaaatgatcggcagggtctgactgtgaccccccggtgtatcccttttttccgggctcatcctttcggacggcatcataagtctgatctttccatttgcggaagccccaggagatagcgccaataatgagtgcggcgccaccgacactgccaacaactgcactcgcgattactccgtcagaaattttatcactgtcaccgccaccggtagacgtgtcattggctttggaagcagcgccactgtcgttttctgtgttatttgcaacactaccggaagtctgtgaaattatcagattggacaccaggatattcacgacgttcaatgtgttcccgaagctgggggcgtagtcataaacagaagaggtccagtctgagccgcatacagtatgattgcttgtcccgccgcattgctgtgctagcgtgatggctgtgcggcgtagtttagcattgatcctgttggcgacctctggcatcaaatttgatacactcgaaagccataaggctaaaaaccctttacctgcctctgttgaatatcgggcctggttcaccgcaccaagtccatcaaccagatcccctacttccactatcatgttccgggtgaaaaatgatgttaaggtgttgtccaataggccttcgactcttgttttccatagatcagtatccgtctgtacctaccttgtcagcactctatagacccttttggacgacaaaaagaacaacaggagaactcaaagagcaaggcaaggagcacttctctgcggaggcaactcaccattttgaacatatacgcagcgccgctcagccacagtccataagaggatgctaacctccaatccttcaatacaaaacaagcagtattgttatccatcccagcaacaagggaattgatcgtccaatcgctctcgttcaggatgtgatttttcacgctccacgaccaaacagccgaagcccgatccgcaaaaaaacgtcgttgctcccccgacgaagcgtaagcaattcgggaagttagctggaaatatgtaccagtaaggtacccaaactgttgcccgatgaggttttgggagtctggtgaaagcccatcggtacaaaagtgaccgcttttccacatgagtttgctgtgcagatttacagcgcaattaaaccaagactccgacgaatcggtcggaaagcctacttctgcggcggtcatagcggctagaccccagatagcggtgcttggtcttgtgttggttgaattgtagctcgaattgaatattgttggtctttggctgtccatgcggtcaatgacgaggttgttgtaattactgttcttggtcgtgtcccagaaagcgagcaaagtaatgtataccgatgcctcatcctttacaccgtgaaaaggatcatcgcttagagggctcacgctgccgtcgatggtagaattgctgagaaggttcgtgacttggattgtcgcagcattttgaattgattctgggccctattagttcatgtgctaaaccatatgacactttcgtacttggcaacatacctgtgctattgatatctaaatcaatagcagaaaccctcgtgaggctgctcattaaccatgccgcgtagcctaggtggcagtaaatcatcgcaatatggcgaacggggatgatttacaggtaacacgaaggagagacgcgattagggatcaaataaacaatgcgctgccgcgtgtcttacgttacaagatgtattacacccttacctgcgttccaatcagggtcccactaaagtggttcgttcacatggtataggtaatttcgcgggtgtcgtgccaactgatttgatttttcaataccgtagatattttatcttaaaagttattcacattaccaagctgggttgaatacctggggtactcattgaaagcaattcaaaacgtagaacagaaatgcagacagctgagttggtccaagtcacagcaattagatccggacatgtgatttgaagcctgtaaccatatttcccgggttgtatgctatggcagtattctgtaactatggcatccttataatttaacattcctagggagttgtgacagtgatgttcgtgatcgatcagctttgattccacaacaactctcacacttggggctttgcggaacctcacctaaagcactctagtccttattaggaccgcgactcgcccaaatctcatctaccagtgtacccttgtgagtcaggttgaaatacagatgtaattaatatctggcgacgtgccaatacactggcgaattgggaacggtacctcaaagaaatgtctaataactttgaattaattatcgtaaggcttagccgctcgtttcgttgataacgtcaaaagctcgaaaagttgttgcgccaactacgttggattcacattcattgctcattcttagtggaaggagaatcatacggtgcagtgcgtaggtttataggtactggaaaaaaacacctagctcgattaaaaaagtgcgcaattgtttcaggtctaaaaaccaatcgcaggcaatcaaaaagcgaatccctctgtcccttgcgacaaaattgtcaatgcaagggccacagtccccattcgtgcatataactaaggaggtcgccagggttttatggaaagattatatattgcacatttagtgtcacattcctcacttccaatgctattgcgagtcacattctcgccagctcggtcaacttgtttgaggtgcttcagttttcctgtatgactagagactgaagttcttctatgatggtaaagcatccagtataggagtaagttggttaaaacttctggtggtggaacaaaaagctcatttagggcagaacaaatgactttgagcgatttattagtgccctcgggcagtcaacagggacaagaagagttatggattagcggcaacggatcacctagcactgcggtcttatacggaacgcattagaccgtagcgtcaaatagagcccgtcggcgctcccttggacggacgcaatgtgtctttattgcactagtttatatacagagggaaggcgggagggacaaaatcaagtcttgactgcgtgtgcagtcagatacacccgcaatcatcatccgcgcaacggaaatcggatctttgtttatcagcccctacgaatcgcggagaacttaccagtcctcgtcgacgtcgactttctcgcagagaatgatgacccgatggcagtgagtgcgagagtcacttgtgatctattcttgagttcatacgcgctgtttgaacggtttccggataccatgaggtctctcaagggtgctttgatgcgcaaatggcatgatcttacagatgaacctgatttgacatgtttgatcccgttacttcatggatatggcccctttgatacgaaaacaattcaccgtcttcagatcgagcttacgacgaagaagccttcatcctcgtcaagcccacattggctcaccagctgaaagccacagcggcggtagctcagctacctccgagtttaaaaatgacgaggaagtagaagactatggtgtggtaagctttctgccaattgaagaaaagaaaaactctggtctctacaacatgaatatgctgtgtccacctttccccgtgcttctccagggtatcaacaagatttcgagtttcggccagtctcaaaaaaaatactaccccctcatcatttacctcgaattctcaaggctcgttcgaggaaattcgcgtaagagcggctggatcagagtctggatggtcacgcgtctttgccaagaagggaaaatacatcaatgatgaactcatcgcattccatacgattggtaagactgtggcgatgaccaaattcgaatacgtgctgcttcccatcttcgacctggtcaatcaatatgacacatagaaggccaatctctcagtggacgttctgagttccgctctattcacttgtgcgccgttgactagatatttccgagaaagggcggatatattcttcctgaacctcgccatcggggtccgactggcgaccgagctgaatgaagtattgtccgaaaccttcgggtgggctggaatttaatgctgggaggaacccagacatctctgttggttcgaccgaaggcatgcagctacagctattgccactaccagaagaaaacaaatatttgtcttcacagttgacggtagatctgaacatagatttcttcgccttcttgttctcttcaaacctccgaccggacgatgtctttttgaagaaaagccgatgaaacgtatcagcttcaacagcggttttcgcacacggggaagagtcacaggggacaattattcgtcggatttcggcggccaggcgggctggtatggtggtattgaaacccccctccccccaagacttctgatccaatttgatatgattagtctgatttattgactttggttagatttccccccacgcatgcattcgggaaagcatctttgccgagccacggatcgatcaccacttcgcatacgcaggcatcttgaccgagttcgaactggatacatctagattatcggtcgatgtgggatgctgcatgggcactgacatccggaaactggattgatgggctgtgtggttagctttattcttacaatcttctgttcaatgcccgacacaattgcgtcaattagatatagacccttctgatcgaatgtaccagggtcaatatgctatacagctggtgtggggtcgatgtcactttatttttggattttctttattttcgttttcggcataatgtacttttgacattctacatatactacaacacatattacagtgggcacagctggaatcctcaagtagtagccttgtctcttaggcagagagaaagtttaggggccttcatgtgaactagaatcccagagcaggacttggaccagtcaccacagaatgaaaaaggagtttacaggatgctcttgcattagaggataaggatgtctactacggtttgtataatctccataatagctgacctctctggatggttggtgttattgtgtcgctctcgtcttgtctgttatgccatactgcctaccgtgcatatccctcttcaatatatatatactgtcttggttcagcgtcccaggtcagtggtcactttatacacaccaaagtatgaggtgagttaaccaatcgtcattcactggctcagcacattcctcacaaccatcttcaagtccaaagcagggacactcaggagtttatttccagatggatcgtcgggagcgaccacaatatgtcccatcagcctggaataggtgcacggccaataatttcaagaaacagtaatgatagccccgagcaaacttctcacgaccttgcgcgagtacgtcttatgtgttggcacgggtgattctccatttagacccgctttccacttccagtatttccaagatgtcgttctgcgttgtagtcaccgaactgatgcaaaaaaacttgttggccattgcggggggcaaggtgcagcgcacgccctgttgtaccgacgatagcgttcagaagttggttgcggataagggctcgtttcccgaatcgtaaatcacggcggatttggcggcaaggttgaagccgggggcgccggggtttttgagcaagacctggaattgctgcgtacccaaggcctttgaccatctcaaccccgagaaaaccccgagactgcctcctacctgtggataattgtcgctagaacctatttagttaaatatgtgctagcatcgtggttcatggtctgtctccacgcaccccaattacgacgaccttcttgatgggatctatgctgctatagagagagttgtagtgagaaaaatttctcgtatcggatgagtcaacaattgaaaattcaggggttgcccttcaatttcaaacaagtctaacgcgggtgataaaagacttggcgcttttaaatccgagtgacgtcatatgtaagcatactagtagggacatgcatgagcttaattcgacccctggcggcttccaacgtggttatttgtggaccatcgagatcatgaattacgtttacctcccgatacggtcccttttgtcatggagtaagggatgaaatctcttcacggatatattcctacataaggccgtgatgacaacccacttcatggtggaacctttatcagtagccaacccgatgtccacaaagcatcacaaatcgagttttgtgagaactttctgaaaccgggccgattatgacggcataggtattcttcacggacataatcctaaggccgtgatgacaatccacttcatgttaagtggaaccttttcttcagtattagtcaacccgatgtccacaaatcatcacaaatcgggttttgcgagaactttctgaaaccgggccgatcatggtggtgtaactataaaggggatttaggctgaaggcctggggaccctggtagaatcattcaattcaatatccattctcgatttcatcaaaatgaccgattacaagtttgaaggctggtgtggcctcggccctgaggctggcaagggcaagatggtctggcaggagttcgagcctaagccctgggaggagacagacgtggacatcaaggtcacacactgtggtatttgcggttcggacctgcacactctccgcagcggatgggtatgttttctttcagttgctctgttgactcggtttctcttttctttgaattacttcgttgtctcagtttctcgggtgaattgaaggctaacgtctcttgtgtatcgtacaggggccgaccaaatatccctgctgtgtgggacacgaggttgttggcacagccgtgcgtgtaggtacgcaggttaagaacggcattaaagtcggggaccgtgtaggtgtgggagctcaaagcggagcttgtgggaataaggacggcgactgtgaagcctgcgcggcttcactcgagcagttctgtaataagatggtcggcacatacaatggagtgtacgcaaatggaggaaagtcttacgggggttatgccacttacaaccgctcgtcctcccacttcgttatcaagatccccgacgctatttcctcagcggacgctgcccccatgttgtgcggtggtatcacgacgtattctcccttgaagcagaacggctgtgggcccgggaagactgttggtgttgtcggtattggtggcctaggtcactttgccattctattcgccaaggcccttggtgctgaccgcgttgttgctatctcccgcaagtcggacaagaaggcggacgccctcaagcttggggctgatgactttatcgctactagtgaggaagaagattgggtcacccgtcacggacagtctctcgacctaatcatctcgactgcctcttcttccaagatgcccattaccggatactgcagcctgctgcgtttccgtggtaccttcattcagcttggcgccccagaggatggtggtcttgaaatccctttctttgctttgatcggcaagggtatcaagcttggtggttcgctcattggtagccctgatgagatccgcgagatgctggaccttgctgctgctaagggtgtcaagccctggatccaggaacgccctatgaaagatgccaaccaggccattgtggacatggacaacggtgatgctcggtaccgttatgttttggtcaacaacctgtgaatcagcttactaggaccgatgtcatggatatgagctgaaatgatgttgtaactagcggtttgacgtttactacataatagaggtatatgagagtttagatcgtgaggcgtatttgggctgctggggtctttgtccctgcaatttaattttctctgattcatggtgatatttgactcgaatgataggaataatccgagttagcaaggcttgaatcacttggacgagttgtcatgacttacctgcttagaagctccgcaacgttgactcaccgaaaagcgcatacaatatcgtcgctaggaaatatgaatttttttttcccctggcctcgatttagtattgtctagactgcggaaagtgaggtcagggtcgggcgaccgccgacgaatcacctctcctgttttccctccagctggttgatccgatgactatatctggacccactctgctgaataaggttggaatcgagtcgagggcttagttacattgatcgaagggcttaagccttacatacagctgatcgaatgttagaatgggaccgctaatttagcgtgaaggaaaatatattaatccgtattaatccgcgtttcgaccatctatctgctcagaggggtcttagtgaatgtcgagatctctctttactctaggatgtcttcatagcttataataggcgttcataaagaccgcgtgatcattatttacagtattatctttaccactaaatcctatcttcttctatactaaggtattataacccctaaaaaatcccgacattcgctgatgtctaacgttcactgagctctcggaactcggattaatacgtgttcctctgttccaaaaggcgctaaaaattagctgtcccatctcaacattcgctcagctgacagatgaagggatgctttgtcagcatatgatggatgacaaagctacccacctgacctcgggcaggacctgcctgcccaggtgccctaccctgtccaggaaggtaaaagcgaggagtcgcatcaaatatatatgttgtagtgtttggcgaaaattgttatgataatatgaacgactaagtggaataagctcgattttagggtgggttttaatgcccggggctacgactaacttgaaacttgctaactaaattgtccgatagaataaccatccattcctattgcgctgaacctttccttaatcttttcaccgaaatgtcaaatcagatatcaaatcagatgtcaaatcaaaagacccttctggaagattttaatatcggaaatttcgataaacaagcgctcaacaaatcagtggaggcaaaaaccggcgggtcagtcgtactcgacgaaaaccaagccactataacggatttgcagagcgtttcctggcctgtcgcttccgctcttctggtcaaagaaaacggatcaggcggtagaattcaaattcatgagcaatcaggagagtgcgtgttggtggtgatgacgggccctcaatttgacgaacacttcgccatcgcttggctaaagaaaggccaaaactttcgtttttacgggaaaccatcagtctggtttttcagaccagccagcttatagcgcacaagctgttcgcagaatttcaaggacacatcgatttgaaagtgacctccacgctaggcccgccataccaaggacaaatcatcttcacagcaggaggaatggctgcttcgcggagaataggagctatggagcgcattccatggtccacagtttggccaagtgtgtttttctcaatagccggttcgcaggaatagaggatctctaggaattcgttccgctcaattgaaacagttgactgaatcggttgatccgaaggtagaccgaagctgtattcttctatatactattagttttagctcatgtttaccacttcttgaactgaccgatagttggactcaattgaacacccttgtgatgcgactcggtaataccttgtaaagctactggtcctccaacgtcaagagcagaagcagaagtgtcttgtttgtaatatctgagtctgaagtgttggcataaagccaacgcaactctgcccggggttctggnnnnnnnnnnnnnnnnnnnnnnnnnnnnnnnnnnnnnnnnnnnnnnnnnnnnnnnnnnnnnnnnnnnnnnnnnnnnnnnnnnnnnnnnnnnnnnnnnnnnnnnnnnnnnnnnagccaacgcaactctgccagggtttctggtttctcttgaccggcccaccattccatggttttaccgatccatttaagttgaaagtcggataatttcgtcttgggaaattcgagcagtgacaatactaaaagatcggacgggaatattttcatcatttctcgaatattgccccgcgatttttcatcccttcgtatagaagtacgagttagcttgtcctctcttcactcgagctacccaacgaccttgtgtgacgacttcccagaagttcgtcagtcattgaatcaccattcttatgaagaagggcacaatccttgccagcagactgcataatttcaacacagcgagaagatagaatatacgaccgagccaacatgatgcttgtgaaatatgtgggtcgcaactcctgtgatgcaagcgtgacattgcatactggttattcaatcaatttgtagacagaaggccgcgggaacccaagaaattggagataatcaataggcttccattgttggcagcagtcggggctatccgtagttttaatatgcaaggacgaccgtaggacgagcgggaacttttttccacctgtcaaggcgacgttctcggggggatggtggaagaaatcaggaacgtgctttagcagacctagaattgcctgcaaatgcatgtctagggacttcgatgttccatcatacctggatgctgcttggctccaggggtgtagactggcttggtgacatgcctggaagtgatcctcaggcggacaaacaccgtcaccagggtaccaattttcaacatcgctggttgaagaatcggatacggagctcgactgctcgtcatagtcttggatgaggtggccgtgttggttctgctggctttcctggctgtgcgattctagtgcttccatttccctttctcgatgagagacttgacgaagagacaaggatcattggggagatttgtagggtgtagaaggggcatagaggcggtgaggtagagactccaggcaggggctgccgctgcctattttcagccccggctcaaaccatcaaatacccattatccaatgtgccactgtaaagtaacggaagtatgtgggttgagattgaaaattttgcctaggagatcagctggctgctatcaacatgttactcataaactattcaaaatgtctttgtaagtaattcacaatttatgtacccaaggaacgctgctagatcccgacaataatatctagcagtttttgaactccgaattcgaaatatctgccacctggtcccttgaaatggatctgacattcacatggtggacatccattggctgttggcagcaataccggctcggagagaagatgacatcgcaacacctgatcgaattgggtaattttactaaattatagggctagtgagaaatgtcactcaaatggcgctatacccgaagcagtttagaggatttaggggcaaacaaattctgcctcaggccataaacctattgcctgaggcagacaggtcttctttgacccgtgagccgttaggtcggtgcaaccttcttgtgtattgacttttgaatgaaccatggaagcatcgaaggggaaaatgacgactgcatagcatttccaacgaagaaaaaaaatggaaaaccggaaaccgagtttatctgcaccgataaactctatgaggtcatctagccgtaggtccaaccaccgggcaaattcaattggttcagtactataatttagattgatatttcatgtctagctaggaatatgctgtgctttatattgccatatcttttgcatagcatatcggtataagatgaaataagaccaaataataccaaatgagatcaaataagggttgcagacaacgtggtccccactggacacggggcacagtggacgatctctatcttaaaagtgaccagatggatccctccaaccctggaagtgacccacaacgctcagactttctttgatgaggattcctattccggttagacaagtatggctgtgtttcccgtcagatagcgagcttgaatctactttctcttgactccctgtcttgcgcttctctcttcttctcctcgttctgatcaatgacccttttgaatatgaatgggtgaacttcctatacccatgcgcccctttcgttagaccataaaccctaatcatcacgacgaggtaccccgccaccggatattaatcctaggggcggtatgatcggatcgagctgccagcttgcgattatcacgaacaaacttcatgcatactcaagcaacgattattgagagaatttccgcgttcaggatgccacatatgatgacaacattcaattcgcgcgcaggccgagtcgcggtgctcgcagtcttctttatcctcgcccttatctggctcttgcccagccatgatgcccccttagtgtcgccaatcttctacgccggggatggatacaatagcagtcaccccatcgatgctctgatcgataccgcaaagaccgatctccacgaactcctcggaacacaagcgcacgaccttcaaactgccgcagaccaatatcgagcgcggcgtgggagacatccgcctcctggttttggagaatggtaccagtttgcaaagtctaaggattcattgattattgaagaattcttcgatcagatctatcacgacctgactccgtactgggctctcgacccgaaggaattgcgtcgacaagctagaagcatcccgacccgtatcactatccgcaacaaaaccgcgatattgaaaaccgatgagccgagaaattggatggactcgtggtatgatctggtcgcgaaattggaggacggactccccgatctcgatatgccaatcaatgtcatggatgaaactcggctcgttgtgccctgggaggaaatcaatgagtacattcagaaggagcaggcaaatcgcgtgatgacgaaaccgagccgtgttatccccgaatacatgtctttgaccgattgggataacgaagacctggaaccttatgatcctggatttgcaattccgggcgagggaggttactgggagatggctcgggttggctgcccacctggaagccctgcacgcaccagcaccctggccaaggttgatttcagtactcctccttgggaatacgacaatttcgagagaatgtcataccacggttatgtatcaaacttcacattgacaaaggacccatgcgtgcgcccagagatgcaggtattgcatggaaccttccttgagcccatctctgtttcaacttcgcacaagctgatgccattgttcggcgggtccaagcttcccatgaacaatgagattcttcttcccccggcgatgtactgggcccagaacgaccattattccggcggggagaaggagcacggtggcccttgggcatcgaaaatgaataaggctatgtggcgaggtgctgctactggcggccgggctcgagagcccaactggacgggcttccagcgacaccgattcatgtcgatgatgaacgcgacatcagtggctcaggccgagaagaaccaaagccacggcatcaacttcagactcccaaactatgccgattacaagttgaagggcgacgggttcatcccgcagcttctctcggagcatactgacacaggcttcaaccacctggtttgcacgccttataatgaatcggacccgacgtgcccgtatcttgatccatatttcgaggtcgcgcctggaatggcaatgaaggatatgtacaacttcaagtatctgcccgatcttgacgggaactccttcagtggacggtaccgcggattcatgttgtccacttccctccctatcaaagctactatctacaaagagtggcacgactcgcgactgattccgtgggtacacttcgtccccatggataccacttaccttgacatttatggaattatggcatatttcctcggcggccgtgacaaggttgcccgtaaaattgcgctcgctgggaaagcttggggcgagaaggtcctgcgccgggaggacatggagatatatacataccgacttctcttggagtatgcgcgcatttgcgatgatcagagggaattcctcggttatgtcggtgatctcaagatgtgattgcttgttcatacgcatacgtacaaatcgactctcgcggtcaactccccaatcctccccagcagagtcggtttatcgggcatgattatcggactttttttcataatcgaaaaagatcgttccgcctgaatccttatgtggcgccctagcctaggcatcccgactcctcgggctttctcggctccatcctcatggcactggccttgatgtctccatcccggcgttattggctttctcagccttcggtctttctctcactcccttcttattctttaatatatactaccttcatgtgatgtttgtttttacttgtcgatgattactgataccatgtcaatattcatttctcggccagtgcctgatgtacatgaaacctgacgacgatgtacataaataggtgatgtttgtcatttatgattttttatttgcttcttacattcctctttgcacacagataattcttacattagaaaagcactatactcgaactataacacgtcttactccttccactcatctctgccgagcctaacaatatcagcctgttccagagtccaatagctcgacggggctttgccctcttcaaccaaacgagcagctgctacagctgctctaccaatagtagtttgatcttgacctgctcgcgccagttagctctgaatcttcgtcaacattcgcgtgatcagcatagccataccaactttgtcttggataccctgaccaagcttctgaaggccttccacaaacttctctagaagaaaagacttcgacttctccctcccaataatcatcccgggtctcagaacgatagcattctcaaagttaaactccatgatggcatcctcgacgccaaccttcattttcgagtatgggacccagccccagagaaggcttcttgtgcctccgctggaaatgaaaacgtacgtcttcacgcccgcctccttagctgctcgagcgttctccacgcataaatcatggtcgatcttccactggttctggatgctgcctgctgttgctttggtagttccgaccgcgttaaagaccactgatggcttgggggacagagaagagatcatgtctccccattttgaggtatcgctttcctcgagtgcttcgagcttatcggcctgcgcattcgggagtcttctggagatggtcttcactttggaaaatgcgtccgatgagagaagggtagccagaatctgagaccctacggctcctgtacagccgaataccgctgccgtcgccatagtgtgaggtttgtgatatggcactatcttgagagagacacgttccaagataagatgatgtggtccgagcgtttgtatgtccccgcctaggccaatctgacagatgacgtcagcatcactatacacaccattgtagacgcatcttactctatcaatctttctataaaggaattaccaaatctattttgcacactaaaggaagtgcggagatgaagatattattattacacgaaagaccacaacacccaataggacacggtctacaacatactcaatcgggcgccctatgcgggattttccgccaaagtcgcgccctgctacatggcttgatttcagactaaccaagtacataaacaccaaaatgaccaggtaggattcacggattatgaatgaacattgatcgtcttggacatctctccagcccaaaatgaacgaccttaatttccgtgtcgcgaccgaagcggacgcgcctcgactccagcagttggtggaatctgcgttccgcgccgaggacagcagaaaaggctggaccgatgatctaggcctctcggcaagctttcgcctggatgtccaagagatcttggccatgatcaccaagccggacagtgtctttttgatggccaccgacgatgaaaatacgctcgtcggctcaatcgggacttccaaacgcgacataaaccacgctcatctttttatgcttgccgtcgatacaagccaacagcgcggtggcgttgggagacaggtcttggcttacgctgaagactattcccagaggacttggggtgttaccacgctgggattaaatgccctttcgaatcgccagcaacttatctcgtggtattcgcgtcgtggatacaaagaaacgggcgagacatcgccctttcctcgtgagaagttcgcgaacttggcgttaccggatgatctttgttttgttgaatttgagaaggttctggaatagcacctaccggacaagcgcacgtcctaaaccggggctagcaagtccggtggatcgaggataggtgggattgaacggctcagagaagatcgagaaatgtgaactaagtgaactttcgaataagattcagaaatgaactttagcagcaaaatggtcataagataaacctaaaattttaggaattcaaaatatccgtccaagtacatacatagccagcgcttcctagattttattcgccgaggctagtacgaacgtagacaagcttgcatattgtgttaccctaggatcctggccttaaatctccttgcctatcttaagcccgaaatgttttctacatgacttcagacaaaaatacattactagactaggcattctacataccaagccctcaactagaattatttgagcttaaacctaactgcaaacaaggctcaaatgggccatcattccttaagtcatgtcatgagaccaagaccttacttacaatctagcatcaattaatcttgtcgaacactgaggtggatacatggcgaaatagaggatgaacccaggccaaaagcctgctcaacgggatgaccaaccccatagaaaggttcatattgttattactcaaagtcgtcagtccgattatttcctagtttgtagagaattgcatatctgctgaattacatcatcttttgcgtactgtatattgctgtcaaatcttaatatgacgaatgatagaagatcactcgcgtgcagtactgtcacactatcaaggcaacaaacaacaagtcatattgtcgttggctatctcctctttgtttttccgctcgactggacagaagatcaatttcaatttttgcgtacgtttaagtgaattcaacgtcatgtagctacatgtactaatgttgtgtaacccaccctgccaaatgccccattagagtctcaagcctacatttgtttataagttggataactgctctgatatcaaaaggcacgaaaagacacaaggacaactcccacattccaatacaagtctacccatttatcaacattatgaatccaacatcccaatcggctgtgtcatcatgtccaaaaatcctaatgctacatggtaacataccgctagtttctacaaaatatcatatagagctttgaagtatgaatctgactcattcacctcttctcataggctacgcccagtccggacatgtgctccaatgcaagaccagattcctgaagcctcaagtaagagatgctgttctcaacgctctgcagcaagatgcaaattcaaagcccgttgacgtggtcgagtttcactatccttcaggcacgtggcctatgaaactcgatcaaccccgggagagcaatgagctgtggacatggggacatggcgaatctatgactggccgtatccggggccttgaacagtctgtcgatgatatcttccgctatcttgagaagaatggcccattcctcggggtcatggggttctcctcgggtgctgcagcgggtgctataattgcttctcttttggagaaaagacactccatcggcaatttccaatttaatgtaagctgggggaaatatagttggcctggaacatgcccaggtggtagcatggctgactttctttcccttagacggaccacccccctttgaagtttgtggttgcggtttgtgggtttgcattgaaagatcctctttacaacgacttttacagtcccaaaattgagacgccgatattccttgctattgctagcctggacgtaatagtcgatgaatctgaatcgctgagactgcgtgattcaagcacaaatacagctttgtgctttttcgagggggcacattatgtcccacgagacaaggtatttttgaaatccttggtccagtttattgaagatgctttgagcatcaaagaggaccacgaggaggattgggaggattgtggagataattgcggattgcagtaggccatgacgtgcaactggacaactattggaaggcaccactcgggctcaaacaggcaggaaggtactgccaaggcaagagccctgaggaaggaacgataaaaaagtgagtatagatggaaagcttaaggcagatattgtaacccccaaccccgcgttgaaaaactgtgagttacgggctgacggcagggagcctaccctaaaaagttggctctctgatgtctcatacactgagcgaggcgcgtcttatgccaatgaggaaactatccctaggctagctgttgtgaagaacctctggggcccttttgttttctttcctccttttccatgcatgttacaagttgatcacgtgatgccaccagcccattgtttttcgggcgaaaaacgtttgtcttgtttgttttgttctgcctactcagctatgtccacaagattgtgttttttggactattgtcattttagagagttagagagattattgagattattctgccacgtatacactcgccttaccaccgtttttccgtcattctttcctcctaagggatcatttgaagctattcacatttgacccaccacaatccccaccataaccccacccccacgatgtcaaataactagacctccagtttactctttctcacgtattgattcctgtatgtggtcgggtatacatacctctctagatgaagttatgccaagcttcggtacaaccgtggatacgcctccccggaaccaactttttagctttgacgaagtctttcacagccttggaattatagaatcaattgatcttatcatatacagatttaattaaagagtgccataactgaatccacttctgggcttgaaatatttcaagggcagttgagtctgctgcatatggtcaactggctacttagttgccttctccaaatccgcagcccagagagctgcgccaacagtattcgtgaatgaaaatgcgatcgaggcaaatggtaccatttccaaaacaaaggccgcaattccaagtctgatgagcagtcagcattcgaatggatggtaggaagaaagatggagtttacgcacccagtgtatgcgccctggtttttcttcacccattcctctcgcattgtagaatcccaacccttgagctgaaaatacctggcatgaagtatcggtcctgctcttttcccttgtatgaagatatacaacactgttccgaccacaggaatgaggttcaggggcaggtagagcaatgatcgcagcagcgcccgggggttcagccgcgcgagaggccgcgtgaaaatcttacccagtctagccatcgcatctctccctcccgaacggggtttcatctggcgtccttgtgctacaagtggctcctggtcacgcgcgactagggtgccatcgaacgtgtcgatcagggcatcttcgatgagaaatgaacgcgagaggacgcttgttatggcggaactttcgccgagaacgagaatcgctgcggaaatagcagcgagcgggccactggtgaaggccatgatggccatctgcggcacgtacgtgaagaagaacatgacggtcgtgacgcctactcccagtgtgatagtccggccagcgcgagatataaaagggcgccagaggtctttgtgggctgcaaagtagacaattccctgagaagatatttattgcaattagagatggtcgggaagcgcccctttaagagctgacaggcatagttacttaccttgaatggatacaagtaggcgccagacgtgatcacgtcatgggcaattgcttgactgctcttgacctcggcaagcactgcatctttgatcttctcggacatctttcctatagaattagtattagtatcggatgagaagaatgagttttgggaatcgtgggagatgacgattagattatcgataagaaaacagccttataatgacgtcattggattgagcttccaaggttgtgcgggacggagtgtactatgacaggtatttataataaatcacatttctacggtgtggcaagcttagttatatatctcagcaagaagtgatctggataggaacatggctgagattagttctcactgaaaggagtccatcctgcagccaccatatcgaccgccctctgagtcgcttcatccaagtcctccttaggtaacctcagtgtatcatttgccaactccattatccctgcaaaatcaccttccttgttggctggcgaaaatacaccaccataaagcatcttagcgaaccccgtgaaaattcccttagacaactcgtcggcgccgtctgcaagacgcttagcgacactctcatgagtaatctcccaatcagagtctgtagtgcccaagacacgatgcagactgtcgagtatatcgcgttgcgacacgcggaagctattgatccggacttccttgttcttgaagtcgacaagcgcaggggttgatcctgactccggtaggctgaggagggcagctagagcgcgaccacattggtcccaagtgctgatactaatgatgcgagtaccctcgtcgaaaaacgtgacctttcggtctttgatcgtgaagccgaaccattgctcgccgcttgccaggctccattcgtaccagaacccgcatgataatgtcactgaggacgagacaccattttgagcatcactgattcgttcaagaacgctctttccatatgcatccccatctttcactccctcagggctaagagggaatccgtacgcatttggcatgatgtaaggaacaccagcctttccggcagctgcggtaatcctagcgtgaagatcctcgggggctcggacgctcagggtaatgacaaggaattgttggccattcaaggcattgacaagcgagtcctcatcgtcgtacttgactcgaacggctcggactccattagggagttttgactggctgtcttcgcgggtgagagctgtgactgtatgctgccctgtttgcagaagcgactgagcaaaggctccgccgatgcggccagtggcctgatgattgtcagcaatttctcctcgaagtgggaccggcaaaatgtagggcataaggcaatagacctactccgacaatggcaactcttgtgatatgtttcttggacatgttgaaagaaattgttagaacaatggtctgaattcttgtctgacaggttgcgtaaacctcgtttatatatatatatatatccatgacctgcacggagttatcggactaaggaaccgccgcctggagatagtcggagaatggacataaggactagtaaagccgagcctgacttggtttgtgctgtccctgatcgtatttcgcttgatatgacgagtgtatacaatgagatccgtaagccaaactacagtccacttactccgtcagcccagcccaaaacctccgaataaaaatagcctgtgtcaaagaaagaatgacaaattgagcttacgcgtaaaaagagtgatatgttgcagcatttatccccagtcaataattaagctgcttcttttatactgccgcaatggccgtgagagttttgcctgatggtaagggcccacactaattgaagaggtaagtctgaatccatgtttaagtcacgttaattcccacttacccatccatagttatcgcaccggcattgctcgtagagagggcaactaaaaacgaaaacatagtcgttagtatcccatagtaagcaatgactgtctctcagaagacacttactgaatcccctccataccgaacaccacatgccacaaagtttcaaacacccacccgacaccgtagtcatcaacaagcggcacactcttttcattcacccagtttagcatacggatataatcacttttgggtcgctgccagatgcgtgctcggctgaccgcaaactgagcacagcagatacccccaatgtgttccggaacttgcgcatcttccccaaatatgtctttatatatagttggaaaatttgcacgcgcatcattcttgtcaatgtctgcttgcgtgggattgttgggattgacatgagtcggacagcctgggttattcgtacagcgcaggttcaaatatcccatcgcatccacggcttcgcggcgcaggctatgcaaaacgctgcttgtgtgggggccaaacagatcgttgtgccactgttcggggttggcatggaggaaaatcgagtactcgggaagctcgtcgtataggtcgacaatgaacgaaagataggccgaggcttcccggccgcgagaagagtgtgcgacgagtagttctgtctcgggctttttgtccatagtgtaaataaacggagtgttatcgatactggccatgggcattcaattagtgtggtcttttataaccttgggacttgtttgcttactgtgtttgaagataatcacgaagccatctcaagtcatctgagcgtgtctttgacattaccaaagcgacctttgtggtggttgcattgtagctttgggttttcttaaccagttcatgtaacgctgcagtcctttctgcctcttctgattgttctactggcatcagcatagagccacaccgaatttcacagtgcagtcgcgtacttgtgtctagggcttcatccacagtttggactgagcgataagcatccaaatcacagaacttcagaatcaggaggactgtgcagccaaatatcatgagtcctgataatatgggctgatgtctgatccatgagattatcgatctcttgagtcgtgctggatatacacgactctcagacctgctgtgactgaaagtgtcgctcttcattctgaatttgatatgccgtcaagaattaaagtgggagaaagagaaattattttggttctgggtgtgcgacctggcttcagaccgtagttttcgcggccgggtttgcaacatgtgtgaggctatgaccccccttacgtgggaaggttgtgctatctcaatccatcgaacttactcaggaggtggacgtaagcaatgcctagatctctctgctttataaaggtagattcccacagagtatgcaaagagtaagatatgacgacacaaactggttgtgatgatgtaggccatgtatgatgtgccatgtatgaacttgatatcttattggtcgcaatcacttcatacatggctcgcccttgcgtggtaggtggtcccttgcctttgctgtcgatatctcttaccgaacaattcatgtacccagcaaaagattttcgacccatttttgtagatgccgtggtccctcttgaaaaagctaggctcggtacatgtatgttgttgaagaggaatggggcggtatgtgcctgatgttggtaaatgtcgaaacattcgtaatcccatcccatctgatgtgaagttcacgcggagtatgtactaaatatcgctgacactcaaggcaactgtcataaaacaacatccaacggatgtctctgggttacaaactaagcaaacacgctgattatgtgcataactttgctgactttttatctttatgaacgccaagacctggcttatgcaaaaactgggtccaaccaaatcgggcttgattttctatctggtactgttactaacttactccaccgtccgctatgaatacttctatatccaagccggccgtatcgcctacaggcccctctggcacttttatggtcgagttgctgatctacaacgggtcgcctttcaaaaatcactgggcgtactttgttcggtcgcacgaagaccctgatatcggcgtgaagatacacgcgaccggcaatgtgagaagtggcttcgagtttgaaattaagcgcagtgaaaacctgcaaatcaccgacgacattccgtcgacaagggtcccgctgcaatgggtggacgcagattactttgatgagaaggcgatgcttaacgatggagaatacaaaatcgacaatgcacctgtctgtctctttgagaagagtgcttacgaggtcaaagctccaggaaagactctgaactcaatcagtgacggggtgagtgcatccccaacccagcgcctagactgcatgagggtgtcttctctttctctttgagcacacacttacgataatccacacattgctctttttctaattcaccaggattggctgatttggatgtcctagcccaaaccaggtaggaaagttattcaaagggattgccagacatggattgtcgagtctgcggatcaacttcaccgtgacaacattttgagcattgaggttgtcacttatcttcacgcaattaaacagtgatgatgggttccaccagtcgttgagccgggtatcttttcaaagacactcgcctcggtacatgcgaccactttcggttaatgtgagcttgctggcccggctgattactagggaggcggaagcttctacaagaagaatcattgctcttttggaaagtaattcattttcagccaaatcattttacactggagacgaagtggctttcttcagtggcttcgagcagttctagctcagtaatatttttgaattcatagccgcccttacgcaaaaaaagaagcttgaaaccgggcagtattcgttccaaggtgctctcatttcgacgtcaggttcatggtaaatggggtatcatacaggagaacatatcacaggatttaatccccaacaaaaagcaaatcatgaccacaaaatattgagtttcgcaagaccgcgctttggcttcggcatcggctccggatttttgtgccagctttcgatgaaaggccgaattggaatttccgccagcgggatgatcttcgtctttgcccagaatttgtaggcaaaatacacaataacgatgaacggcaggttgaaataagtcgaaacaaaggttgcagtattccaatggccccgcataaatgtcgaaaaccctccagtgaagaacaaaataatgtatatgatcaaggagatccatgttatgtatggctgaaaaggtgctgcccacgggagctccttgaagcgatcgattccctgcttcttgcatccgtagtagaatctaagataaacaatgcagatgcacatcaagttcactagagtagagatcgagacaagattctgcagccatgtgaataccgtactggccgaactggaaagactcatatatccgagtgccatgaaaacgccatagagtgagactgcaacccaagggataccaaatcggttgatacgcttgaagacagcaggggcgtggccctgggtcgccatgccgtataggattctggaaccacccaagatattgctgtttccggaggaccatgctgacgtgagaacaactgcgttgataatcgagggaacgaccttgataccagcatggcgagctgcgataacaaaaggggactgcgaggctgtcccggacgagcccagaagattcggatcggcagatgaaacaaccagaccaaccatgaagattgtcaccacgtagaagagcaaaattcggatgaagatacgtctggcggccataggaatagcttgacgaggatttcgcgtctcggctgcagcgagggtgaagttttcgataccagagtaagcgaagagagcgttgtcgaatgttttccagaatcctaaaaatcggccgagggacccacccactcccaggtactggatgaaggggccatagggggctttccagtaggcaaatccgatggacgtcttatccgggcctcctccacaggtaatcacctgtcaagatggattagcactcaaagtaaacacattcccagcctgaagagcgtaatcaccaaagccatgatgttgatgcctatgatgagcataattttgaggatcgaaaagccaaactcgagctctccgtacacgcgaacaaagacaaacgcggtcgaaagcatgagggcaccaagcacagtaatccatattgcgttattgacagtgatccagaactcgataataacagccgcagcgacaatttccgacggaatcgacacagtgtaggagtatacttggttccatccgttggcgaacgcgagcgcggggtcacagaagacctctgcgtatcgaataacaccgccattgagaggtgctagggctcccatttcaccaacgccgaagacgacactcgcaaccgtagcgccaataattgtgtacgccaagaacgcacccagtggtccagcttccacaatggcacggcccgaactgaggaaaatacccgtccccaccgtgccggcgagggcaatcatctgaatgtgtcgctcatgaagaccctgtctgaactggtgaatctccttgagctggcctgcagcattttctatatcgccagtttctttcatttccccgtcttcgtagtgaggaactttcgggttagacgcaattggggtgttaatgccatggtcgtccttcagaacgtggttcgtcttatagtgtgacattggaaaccccgtggcgtgtcacaaaatctttgcagaagagaagacatcagctaatgaatagcaagttaatagcgctcgtacttttgcacataactaattcttgcaattgcgcacattgtggctccgggcatggtcagttgaaaaataacagctacttggaaaaggccaatttccaatacatatcgtgttgttggctaaggaccgaatttcccctttacaacgcggctttcgcgtaaaatgaaaaaagaaagaagtaaaactcttttcagcggggtttgaatagggcatgtatttactccgtgggtactcatctgctgcccagatgtggagcggagtgggtcacgcgacctgcaatcacgtgcttagtctttctcctgaagaattaaagagaacgtgtgtgggttgttagtgtggcagtcaagttaatgggctagacatgtattttatatctcatttcagcggtctagcatggtcatgtcaagcatcagtgatgcaggaacagcacttggaatattgcggttagggcaccggcaacaagttaattaatctagcttttagtattacatacaacatactgtaaccaggcattaactaacctagcattcaagtggcaaggtggacacaagctatacggaatccataatttcaagtaagcccactctcgagcctccaggccaggagcttgggcgatagatgctactttggtgtccccgtttactttctcttcgtcccatcacagatccacagacccttcgtcttccgatgttagctgctgaaagtgtgtttggaagtgacgacgctttagagcgcccggtcgtaatcgattggttgacccttgatgctgtgtatgtgcctgttgccttgcttcggcgcttaagagaaaatcaaaaagctgctttgacgtaataagaacttcacggtcgagatccacatggcctggtgtgagctcatccgtcgcgaagtccctgaggaatagtcgtagcgcagttgccgcggttgggaatccagagtccgtccggaaggcctactcgacggtcaacgtccgatcatcggttgtatgtcttttttgttcttttctttttccgcactagagaggagtgtacctgtgcttctataacggtagccgcacgaaactcctccacgccatctaccgttgtatactccggtcgccacatagtaacagttgctctcttagatcctttataatcaatatcgaaggcaagtaccgcattcacactcccattagtgtttaagatatactcatccgccaagtggggaacctgccggcttttttgtgcatagcacacctccacaattacaccgagatagtgtgcttggcggtgcccaaacgaggcatctggttcccgtcttgaataagtctgttcgccattatgtgtatcttcgggtattaaaattcgagatgtggcaagatactcgacttcctgagcgaaatcggagagaggtccgttgccctgttggtattgcctcaactgtcttgatatttcgtcggctactcttgcgcaaaacgtatcatggagaggacttgacattcggattgtcaagcagcagcgacaggggtcgtaatcgtatctatgattattccacttgagcacatccggcctttggctcttgatgtcaaaaagctagtagtactaaccttactttatcttccacgtagtttcgaagggattcatctgcatccagcgcacgtaaaacttgtgcatagtcgtcaggtcttagtcgacgttgccaccaggatcctagccggtggcctgcacgatggagtcgtaaacaatccatcacgctttgggcgcttctcgacaatggcttctctgctctaggtggcgacataagaggttcaaaaacactccctggtggactgatgtcagctaccatgagagatacagatactagtatcagaatgtagtttgttatgagatgggttagccacgcgtgggtgtcaaaacatgagcgtgtgacctagcaggcggtgtgtttattaaagatggaagtcacatcgtctcccagtacgctgtcaatatcagtaagcagtaaaagggatgtggaacatgttccaatgacttcctgttgagttcatttatttgacatgaattggatatacaaagatttccgagtgcaactactcaatgaaacctgtgtctaataattaaccgaaatatgaccaagtagatcgttcaacctgagtctcctcatttcaaactgatggcatcaagaccatcatattgaatgccaaagccctcgagcagattggtggcagcagtttcacccgacttataggcaccatgcacgcagccattgccaacaatagtacaatgctcaccagcgaactgcaagcgactggatttgtggtttttcaacgcatcaaccagcagctgcggctcatctccaaccttgtcggcggagtaagtcccatacccagccagtgggtcctgggtccaatgtgtagtttcaacattaaccaggctaggcaaagccttgtatggttctgtgcggaatatcttgaaaagcggttcaaaaaatagatatatccccttcggatcttgcatgttctcgatgcgctgcgtcagaggttcggcaatctgtacgcacagctctttgctgcccgtcataatccataaattgattgtcacggtggcgtaatttaggatattatcattctccccgatcgagtttatactggggttggactccatggatgatgatgacccggttgaagtgtccgtttcctctgatggagatgggtagaagacaaactggtcattctcctttgaccagaagacttcggcgaattcgaaaaacaccttgcccaaggcgccgtagctgcacctagacatgccctcttggatgtcacccggtaagggcgggttaaacgagatgaggttgtggtggtagacccccagtgggctagtcatgataactgcatcgccctggatgaacccgacttctccagcagcatccttgtaccggattcgagctggtgccgtcccgtgttcgttccactccacgtcctcgacgcggtggttgagtctaatgatgtttggatcgcttcggagcgtctccgcagtccagttcacgatccgatcatagccacccttcatatatacattgcgttcagtgatgaagtaagaaagatgtttggacgatgcttggtccgtactagtgccgatccacaattctacctcgcggatagcctgcggagcccactcacgctcatcttcggtgatgagctggtgctggagaacgaattctctcgcaaattcctggactggacgatcctcagcctctgggttagtttcgtagaaccactcgcaataatcagcgaactcgtctgcaactttcttagctttgaactgggatccagttcggccgtctctggtgaagtatagaggaacgccatcgtcataataatatgggatagatagctggggaatgagtttcaccaggctgttctgggaagtttcatgcatccaagcggcacctattgactatcagcacagtccccccctgtttcaacctcgatttcgggtttgtgtcattatcttaccaatatctcggacatggtcaccctttcggcttgtcaaaattcttccaccaatgcgatcgcgtgcttctaataccaccacttcgcagccatggcggtgcagaacagccgcggcatgcaggccagaaactccagcgcccaccacaatcaccttcttgcgctccgacctcactgcgtgtgttccctcgaccaactccctcggagtcttatcgagcgcagccaggtcggagcaacaattactcggttttatgggattaatgcccgttatgagagaagaaagatggaaagattgagccatgctgagctgacaagttgacattcgatgaagttattgagtaagtaaggatcatgttgaaacgaagttgaggggcgttgggctgtgctatcgtggtggatagcgaccactggagactgtagtattattggcttttattgcccgcagaaaattggctatctaccagacttcaggttccacggttattatcgcgtgcataaaaatcagtggaataaactcttctggttacatggatggttctaaactgtatacggaaagttttatagtttgtaggtctaatcagacatttatagacatctctaatgacatctgaaagaatattgagcagcactaaaaagatcacgtagtagaatcgtaatgataacgattgttcaagtccgtatcaccaagtatgaaggctgtataagcaagcatttcgtttctatattaatgactgcagttgatctatcgaagcaattgtcttcctagtacccgtcatgtgcaataaacgtcttagctcattggtgtctcattttttgataagatccattcctctcaatttaatattgaatcacccaaagttgaccttgtataatttagatgatattttccctttagctagttcgagggtgaaagaaatccgaaggatcatgcccaagtaagtaccttttgtatgggcacaccatacaaagaatacttaaacttttgcagctgaaaatcatgaacccgccccatccgcaggtgnnnnnnnnnnnnnnnnnnnnnnnnnnnnnnnnnnnnnnnnnnnnnnnnnnnnnnnnnnnnnnnnnnnnnnnnnnnnnnnnnnnnnnnnnnnnnnnnnnnnnnnnnnnnnnnnnnnnnnnnnnnnnnnnnnnnnnnnnnnnnnnnnnnnnnnnnnnnnnnnnnnnnnnnnnnnnnatccgcaggtggggctgggagagacagttcagattctacggagaaggcggagatctgagcggtgacctaaaagcccctggtggtcgctatatacactgaaatgagctatgaggggaaacaaacctgcaggtgccgggtgaattggggcaattgttcttcggtattcatcttcttccaaaaatgattttctcgtgatcttcccaaatctggccggacccgcatcttatccgcatgtacccgcattcgacctgcaaaggagtggcgggaactgcccacgtgagttccaatcagatcggctatgcagatagcgacctcgggaggtaaagtctgtgaatgggttcaaccatttacgttgccgtggagaatgcggcttttccgcacggatcccggattagggttttggagattgggagaagtagggttcgttgaaaattaaactgtcaatacggaagaagagagaaaggtgctccgtaaacaacattccaatgtggagaggggcgcgtgactcaaggctgacttcccaactgccttcctaattagtcacgtaaccccgagcacttgcttacacgaactggccaggtgattctacattattacacaagagtcttacatatcagacctttgagaatcatgatcacttgtactttttaccagcaagttgaacattaacaaaaaaagcttaacaagcgatgcgtaccactccattgaacatgatttgaatgtgagacctgtacggagtactccgtagccgcgatatatatagacccatataaagcagacgtaatatagcaacatatcgtaagcgatattttgaaaaagccatatgtatatcaccgtgctacttatacataaaaccaataggtcagttgccttactattactccaatgttgtcctagggtttcatttagaaaagactagagacaatgaatgatacgttagaaaagcaaattagataccaagtgatctctatacaggaactttagagctcttcttttgtctagaacacgtatataggagaaagttcagaaaataaaaaccaatctaagttgacaagttggcattcaagcttgaagttttgatcacacgaccagaagttgagagatctggggctgcaataagccatttagggtatgaaaatacacggcagctttctaaaatggccttgttatctcctcggtcctaccttccaaagaacataacatatgtatataaaccaaacaacaaaacgaagaggactacatcgaattctatagggccctgaaatgcttggcccatgcttatctcgggcaggagccccacacgcaaatcgaaaattcttgctctcacaattttcccttttctttcttcttcccccatcatagaggctgatacgctctatttttcctctcgataacatgtctccagcatgaatcactcgccaggtcgggttttaatcagattccgattttaaattcagaaatggaagaggacctgcagctcaatggcaccgagcgcatctgcgttggcggggagatcacattaatcccctcgcccaccaactctccaaatgacccactcaattggagcatctggagacggtactggcattcatttctggtccttgtgtttgttgccctgaccgcggcaaccgccaacgatgccggcaacgctgggaacgggatgaacgccgatctaggtatcacgtgggaccagatcaacatcgccgcaggcgtcttgtttgttggcattggatacacaacgttgctcctcggcccagcacctttcctgtatggaagacgtatctcctatctgatttgtctggtgttttccatcattggctccatcgggctagcctgcacacaaaatgtcggggacaacatctggagccaacttttcgtgggcgcctccgaatcctgcgcggaggcccttgcccagctgtctctttcagatctgttcttccagcatcaaagaggcctggtcctgggattgtacgttcttgccacgagtatcggtacattcacgggacccattgtgtccagcttcatcaccgactcttacctggggtggagatgggtgggttggtttgctgccatcatatccgggggcttgatcgttatcttttacttcacattggaggaaacattctttgatcggaacaaccctattcgcgggcatgatgcgccttctgtcaacgctgagtccacgtcgaatgacctccccctggagaaaaaggataaaccaactgccagcgtacaacgggcgccctccgacggcgaacttgacgaagaatgcggccaggagaaaggaaagacgtatttccagcgcattgccctgatcacgccatcgccaaccctggtcgggaccggcttcaagcagtattgccgtcgcctgttgcacacactgcgcgtcttcaccttcccggcagtcctctattcgggtcttcaatggggtgcccaagatgcctggctgaccttctacctcaccgtggaagcggacaattggtacgaggcaccctggaactacagcgacgctgcagtgggcatcatgaacgtgccgaccctgatcgggtcagttctcggctgcatttacggtggatggttctccgacttcttcgtcatgtggatggccaagcgaaacaagggcgtctttgaggctgagcagcgtctctggctcctgttgcctgttgcgtttatcggtcctgctggcctcatgctattcggcatcggttcggataaaggctgggactggcatctgccgtatctgggactaggattcattggtttcggatggggttgtgcaggcgacctgagcatggcgtatctcatggatgcgtacccagatatggtgttggagggcatggtcggtgtctctgtcattaacaacactattggttgtattttcacattcactgcccagaattggttggatgcgcagagtcttgcgcaggttttcattgcgattggcgtcttgagcttctgctttattatgacgactgtcccgatgatctactggggcaagaagtgccggaggattactcggaagcagtacgaggctttcctgctggttcgtgatggaccttcttagttgagggtatatctagctcgccattgtcattcttcgttcattttgtcaatacatcagcatattgtaataatctgtgtgttttgcggacccccacctacgctgacagaatttgccattcctggtacctacactagctggcggttcttgttttacgcttgtgggtctgcagtggcgtttggcagtagcagagtgagggaaaagaacaggagagtccttttcatttaggacatcgttgtcaatcgtatgaggaccaaccatcttggtggccaaatctttgataggccatgtctgccaatcatttgagataaaactcagacatggcgcaatttgggcatttctagttccccacagaggaaaataaccatcaggcactcacaattgtctgaatagtagtatggtgcttcacatcaagtcaatgtgcgtaggccgttcgtcttcgatttggtcgggacgcaatccacatgacgtgtcaacaacatatatccgatttcacgcaataaataatgcagcacagaaagaatatcgactgaaaccccaagatgctagagtcggggaaaatattctcgggcgtacgtagtcctcccgctagctcctaactatctggggccaactacgcaagctgccccgtcatctcccatccaagctttctccggtggatcgccaattaattgcacggccacaacgaatacatgccgatattctacaacatatacatctcatatcgcccgagcctgctccactatggttcctgtgcacggagccaatcgctatcctccgatgtggtggctggatgtatttgcgtcgtggtcgatgcgatgttccaaggttggacctattgacgcacatctaagaataaaaatagcggacccaagttcatatatatcttgctctcgcttgttcctgagactaaatcctaaatcccactgtttataattcctggggattcgtctgttttctcaatccttgtcgatcgttctgtgcattattacttcagtcgttcgctctatcgctctacagacttcaatatgggcttcccgtcttactgcaagtgggctgctctcgccttggctgcgactgcggctgcgcagactactaccagctgcgaccctatgaatagtatggactgtctcatgtacttcgctgcggacccgcgctgacagtttggtttcagagacttgcccagcagacaccggtctgaacaagtaccgtctcaacaccgacttcaccgctggatctctaggtcgctggaacaccaccgccggcaccgtaaccaccaccgacctaggcgccaagttcaccatcaacgaacagggtgacgcgccgacaatcgaaagcgagttctacatcttcttcggccatgtcgacgtcaagatgagaaccgcgaacggcaccggtattgtcagcacctggatcctcgagtccgacgatctcgacgagatcgactgggtgagttcaccggcatcagacgccaccaagcctccaatcccctcaaatagcaaccactaacgcaatacgcaggaacaaatcagtacctgggacactgaagccgaaaccgactacttcggaaaaggcaacacaacctcctacgaccgcggcacaaccgtaacagtctcaaccccagaagaaacattccacacctactcagtcgactggaccgccgagcgcatcgagtggctcctggacggcgtcgtcgtgcgcacactcgagtacgccgatgccgtcgacggcacaaactacccccaaacgcccatgcgcatccgcatcggcatctgggccggcggcgacccagataactccgagggtacgatcgagtgggccggcggcgagactgactacaccgaaggtccgttctcgttctacgttgagtcggtcaatatcatcaactacaccccggcttccgcgtacaggtacaccgataagacgggcgactacaccagcatcaaggcgacgaacgctactatctctaccaacttgggctcgtcgaactccagctccagtgtcgcttccagtaggacttcgtcttcggctaaggctagctcgtcgttgattgcttcttcgtcggcgtcggcttctgcggcggcttcttccatgagttatgtctctgctgccccggcttactatagttctatctttgccatggctgtgggatcgttcgttgctggcttgatgcagttttagatgggtgtgttgaacatttaataggtctcggtggtttggtgatgagacccggtctattgatatacgcattattgttgccttccagtcattccttttgtgaattgtcggccacttatgcggcctggcatgtcttttttcgaagtctttttagatgctttcttgaatattctttagatatcttctcccagaagcataattcgcaatatctacaacatacgcaactaaaagtcatgaaatgtgcaaaatgattttccatatataacatgtgattgctctgactgatattggtacatgctatccttctttccttctgcgttgaatccgtacatacactacatatatatatgaagctacaatggaatcaaactgttttcttctgagttaaggcatatgaaatgaaaagacagagacaagaattagagggggcagagtcggaagacgggatggcgcaggggtagccgcgtcaatgttgacgacacaccgacccagccaaccttagaaatcaattttcccagccttaaatcttttcactagcgcaacaaatgaggcctctactaagaggatgcttcaacgctcgcttatgggcaagaataatcagaatccagccggggataaatcccgccgatcgcattcctggcagagcctcaccgacgacagccttctaattgagaccatcatcaacattggaccaccaccaaagagaaacccggatcctttccagtgcatggagtcccgattatcgaagcagactagccagccgaagaaaaactcaagtatgttcgaagctaggctggggcagttgtccaagtacatggttggcatggaaccttaggtttgtcaagaacaaacaatttcttcttattcaagtagataatagcttataaccacagagacaacaattatgtcgcattgaaaacctatatccacaagttagtatttcaccgtgagcgctgcacacctggacgtgggataataaccgaccagtgtgtacaaccttgcattcggtatgcaggaaatccaagcctggagtaattccttcaggatatatttggccatctcctctgggactctgttctcggcattctttctctgagatcgaagagactgatacacgcgggttcttgaaacagtacgatatatgtctgccagatggaccagcgactgtgaaagaatcaaaggattgccgaatattctctctccctggatgaacacttgacatgtggggagcaatttgctggtaaaatgggggcactcgtttatttccttgccctgtatagatgttgatttcggtaatttattagtatgcgacgacgacagcgagaacgccaagttcaagggtatcgaagactccgagatgacctccccatccgcatgactgaaccatttgtctctagctatcctttcgaaggagggaccgctgcggctttgtggtttcggtgaggctaggatcgggcctgggccgtatgattatcttgccatgccatgcctatgccatattgcacgccggagatgatgctcgaggtgccgtgagctatccggtcgatattggtgtgttgggcttgcagtgcgtttggcccgtattccgcttctcgtggcttcttcttaacacaagtcctgattgtttcaatataggcatgtgatctccttggtctgaagaggcttttcggtgctaatcacactgccgaagatttgtatgaagcagcccatcttgcagggtcgattgttgtgctgggtctgccgcctgctgcatttctggcgcttagtcctgaggtggtggctcacttctaggatgaagatggtacgtgtgagattgcttgatagatttggtatctgacaagacttgttgctgatttgattatctaggaaaatggtagaacattgtctccccattcctgggatgggctcgcttgaatcgttgggcggtcagatggaactatctatttgcctctttcctttgttctttccttcccaaggttctttcctttttggggttgtttaccactttggctaagcgagacgttcgacttttgcagtgtttgcagtagggccaggtatatgaacaggctgattcccacttctgcacttactttttgtctctctcttcatcctttttaatcaactcaaccacatcgcagcgcaatccatccaacatgcctgccacctgtcgtgtccatcatccatcacatgacttgtctgctcttactatatcttttttccataacttacatttatccttcggacatcctatccacatcacaagcatccattcatggcacctgtcattttcatcatccatcaaataactcagccacgtcagaagcatccttcaacttgcctggcatctatcgtacccatcatccatcagtgacttgtatgttcttgctgtctcttttcttcatatacttacattcattcttcaggtaaccaccatatcacaagcatccattcatggcatctgtcatgttcatcattcttcagacaacccaactacattctctttccaccttctactttatgaggtttgtttcttgtctatattgtcacctattcttcatcttcgctcgtcgtattacccagtgacatggggctgactgtactagacatgcgctcaactacatccagccttaccgtgataggttccggcttcaagacaatcggcatgcttataacaacagcaaacacaaaagcaaaaacacacaaaagcaaaaacaaaaaaaacaaaaaaaaaacaaaaaaagaaaacacctcgaacgatttcaatcaaccactcccagtatcacttcaaacaacattcaaacaatcatccacttcaagcatcaatcaaccacattcaaacagccacttccagtatcacttcaaataacattcaaacaatcatccacttcaagcatcaatcaaccacattcaaacagccacttccagtatcaacttcatacaatcatacctttcaagcatcaacttcaatcaaccttcaaccaaccatccactgcaatccactatcgacattcgactactacaatgcttcgaccttaaaagaggaggaatgaaaagaaacggtcttgaacgaagaagtctccgcaggagtgtctctgaaggagacttctcgtcgggaagaggttacagcgtgtacccatttaaaggagactctcaagaccgtttgctgtggtggtgtaaaaaaaaagctcgcctcgacaagcatctatatacaagctctatctcaatcatccacttcaatcatccaccaatcaactacttccacccgcatttgtgaaggtcatgcgcaggacttttgacatggatgccaatcggagagtgactgctaaagatcttctggagaatccttgattgaaagactgatgtcctatgtataatattgagactgcttgatagaaacatctctgttcaaaacatgtctaccagtgcttttgatatattatcattgaattaggattcaaagtgggcagagtacgtagcgaattaagaccaagacaacattcacccacggtttctatgccattgtccgtcgaattacagcaaaaaagaagattcttccaaataccacaaattatcaaagacaaaaaaaaagtagtgcatcatccgtgaatcgaacacgggcctcgtcgatggcaacgacgaattctaccactagaccaatgatgctagttcatgtgtggggactcggaagttgactatatgagggaaatgcttcttttgtgcgatgtcggactccacccatgttgctgagggcgttgatctcaattgggacataatgtaatagggtgatactaagatgaatgctagaagttgcttgtcttgtatatttcatatccaatgaattattcttagtggttatgttggttacattattactgctgagacatattatatcctacattgtatatctcagagatggatttcaagtatatgacaatgacaatattcacgtctgcaagacaataaatagttatgcacacaaaaaggtagctggtcattaagacattaatatatgaacagacacttcaatgtgcaaaaaggcagactccaagcatagaaggtaaaaagatgaagaagatgcaacaaaaatgcaacggagatgcaagaaatggtatatagagaaatcattgttcatcagtgttccgggtaagagggttgacgatactaggtaacgctggaggaaaaggatattgatcgtcgaagtggtccagctcacttccgtcgccactgtacccaatgctatcgcggttgtcatcaatgatgcgtccgtactcaaggagaaggagatagagatagatgtcaagatccgcgttgcgcagcgcgtgctgcgcccattcctgactttgagatgcgattacctcggcctcaaagtcatgcttctggatgtacggttcgccaactgagaatgcatcgacgggggatacttctgggtcgagaccgaggaagtaggtcattaatccgtacaggtcatcgtagcgattgtccatggggacgaagtgacgccaggggaagagtcgggagtcatgccattctcggaaaatagttgctttgatgcccagcgacttgctgagctgaaatgcgcgccagcgaccggaaaagctgtggccgtcaatgtcgacgaggtattttgccttgaactgctcgctgaagtccttgggctttttgtaggtccaaacatcgtcgtagaaggagcagttcgggatgcagccccaagcctcagtgaagccgacatcgaagtggtccagtgaaaatttgcttggggagaagttgggataggtatgataccggcccgggctggtctcagagaggatggagaccgtctctgacctcatatcagtactgttggtaatgtgcacaaagcgttggcgatgcatatgctgccaattatccgcaagttgaacacccccggaggtgacgccgcgccagaggagagtgtccgctttgtctttccacttgtaatcgtgtcgcgaattgtacacgtaccgcttgtcgttcatgaaatacatattcgcgggaaaaaggatgtcgttgttcacgctaaccttgcactcgctgaagaccgggatcagtttccttgtgatgatattgctggatgctgagaacaaaaacccgtggttctccccgagaacggaaccgacagtgcatagatcagaggatgcagtaaagttggtgataaacccacccaagggcgatttgtatagcttatcggcatcctccacagtgagattggcattccgagcaggggagtcagggtcacaggactctttggcgaagtccatataaagctttccagcgatggagaaccaagacgggtcaacacgatcctcgatggtggaatctttattatacaggtgtttcatgcctggagtgaattgatcctgcgcatcgctgggtaagtttctggtgagggcctcggtacggaggtattcctgggtatcctcgaatgtaaccatgactcgcggttgatccaaaatattaagcgcaatatccatgtccggcagataccgagcaatgcgtttaatcgactttctcagtgtttcaactctccacccttcaatgggggagtaaacaaccttcttattgcgaatctgcacacctgcaatcccgtcgctgaattgtagcttggctgccatctgtcgaatttccgctggaggtaccgcccaaaaaggtcgcagatcgcccgtaatctgttcgaagtcgtccacgttatgcgaattctttttgcgtgcgaacatgtaccattccttgaaaccgggaggtgggtgtcgtccatatgtctcgcggtatttggcgacggttcggcggaaacttgtcgagcgaccatggtcatattccagccatttccggtccgcttctttcatcaggtcggcaatagggtgttcatcgtgcgcatactctccgaacacggggttcgttgttgcggtgaagagccccagattagggaggcggattacggagctgtcgaccgcatgggtgaggaacagaaggttgatgaagcatatggaggttgctgcgcaggccagtagcaagtagaatgccctgcggttccgagggaacgggcggagcattgagaattggttcccaaggtcgggagctacccaggtaggttctagccgcacaccaaatctcgacaatcttacagggattattgaaaagaaatcatgaaggctatgaaaagggggtgaagaaggacataattgtagcaaacatctaggagttgagcagaggaaaggaaaaaaaaagagagccgcctaaggccccttagcctcccacgtctgtcttagggcgccaagggttttacaggcatcatactaataaagttcttggctggtctttccaaggtttgatttaaattacatttggtgtttcacctaagcgaactataagcgacctataagcagcctatcagaacaacatgataatatctatcggcaaccttgtgtagaatatgtagatcaccttgctggaacgtggccgagcaatccgtggacgtgcccgatcaggaacccctcggcggggatgaccgagcagaggccgagtccaatttgactcggatacggtcggctcttggtatatgtgaatattggaggatactcatatatcgcatattttagaactgatatattcacaatcaatcaatgttttaaagatcatttcacgactgatcaaacatgcaaattagactaataaacattagggttattgcccacgggttcttcatggcccggcggtgagacattcctgactcggctcttacataagccagatccttcgaaggcctcaggcacaaacccgcagctcagagctgtcaatgcgactcccacatcttcattacttctttcgacgcgcataatctcttccatgcagatgacgtgaccaattactcctcatgggtgactgtcccattcgaaaatcatggctctaaaacgtactcgcgccgcgctcgaggccgatcttcaagcagagcaatcaccatacgccttctatggaactccgttaccaccactcgacgagggagttcgcgatgatgggtcctttgtgccaatatggaagcaggaactgcgggacgaaaacgggagcaagcgtcttcatggcgctttcaccggtggattcagcgcggggtgaatagccgcctctaaacaaacgacccttggaaggacaaccactgacgtctgttagatacttcaactccgtcggctcaaaagaaggatggactcctgcgacctttgtctcatcgcgccagaaccgtgcccagaaggccgaacagaaacgacccgaagatttcatggacgcggatgacctgcgagaacaggaagaatccagacaactacagacctccgatgaattcgccggctttggtacaacggagctagatgctacacgcagagcgggactcatggatatattgaaaaccagcggagaaactatgggagtgaagctcttgaaaaagatgggttggcgcgaaggtcaaggtatcggacctaaggtgcggcgcaaggccaatctggacgaaagctctgctccgggtggtgatgcggaggaaacatacctttttgctcctgagaacccacccatggttgccttcattcgcaagaccgaccgcaaaggtcttgggtttgaaggcgaatcgcgcctagagtctcacaatgctttgccatccataccagatgctgaggaatccgattcgttctttggggggcgattggctatccaagggaaagctcagcccccaaagccgaaggaatcacggcggggaggacttggagttggccctctcaatgacaccgggtcggacgacgaagatccttattctctgggtccacagatctcatataacaagactattggaggggataagaaaaagaagaaaaaggccaaaccagaaccaacaatcgcgtcatccaacccactcctaaattcaaagcccgtgttcatatcgaagaaggtggcagcatcacgcggaattggcggtttcagaaagtgccgcgacgggcgcctaccgctggatggattcattcttgccgatggcatctcgggaatgtcgatttcagagaagaaatacgatcctcctgtgatacccgagggctggaaaccagccaaggagatatggtcagaaaaacgagataaatcaaagtatgtctctacagctgacgccgcaaaagcttcgtcgcttaatcccacgtccagagcagcacttctgggcgaggatcaactgcctgggaagtctatatttgattatatgacccccgaagcacgggagaagattgccaaacttaccggcaacgccaatttacctccagctttaggagaaaaggcacccaaaggatacgaactccccgaatcaaagaagcgcaaggatctttgggacctcgtaccaaaactcgacaaacagactgccgcccaggccctagctcgggccggtggtgggtggctgccttaccaagaagatgagaaaaagcgtgcacgctaccaaatatttctcgaagttagtgccgggactcgctctaccctcccagaacgggcggaaggatctagcaccgatgactgggttatagagatgcaagaattttgccgagctgcagaagtcttcaaacccatatctggggttatggcatcacgatttacctcctcgtccaccgcgcccaaggttgtctcggatgctcccgactctacagaatctggactcagtagacccgctgaaaagccggacgatcctgcagtagcagctgccaaagttggcatgttcggcccaatgacccgaagcacaatccccttttacccatctcgtcttctatgcaagcgatttaacgtcaaaccaccggagaatgtgcaacttgaccctgaacggcctggagcctccagttccggacctggcacgcgctcccagtccgctggtttccaagccgaaactggcccaaaacaattggtatcgcaggatattatgaaccaactcctcatagactcgttgggttaccttccaacagcagatggtcttgatccatctggtcagcctgttagcgcggcgccaccaccggtagttattgaacctgagcgcaatgatgccctggaggcagagcggcccggcgatgctgtctttaaagctatctttgggagtgatgacgaagatgactagaattggttctatttgtaaatgcaatgagaattcatgtattttgttttcagttaaagtcctataccttgtacgaattaagcaattgtgctctgtaaatcattcaatgttgtggtggtgtgactattggagtcgtccccgcggcattaaatgcgcgaatgggcgaaattgtggaatgtagccttgtttctctttgtttctgtttcattttctgtttcatttctatttcttttcctttaacggttgcctccttttccttgacgcctttgcctcgtctccagggctccaacctagtcggtctgtgctcagcctttagatctagttcgccttagagcgttgaccactactccacgccaacccctctccaactatttcccctcctcatatggagctccttgagtacgagtaagatggtaagaatccaaccccgaccatgaaccccagaaattatacctatgcctatattatcatcaataagactggcttggcgtcgaacgtcacacgaccgaaagccccggccgtcatctccataccatgccaacccgcaatggccccataaccataactaacaaaccccacagggctgctgcgcgtcagtactgtcgcataatgtcgacaaccaaacctcccacacccaagaacgcatctcacatacaacagccacgagggataccagtgaccgcaccacgcaaccaaggcaacgcacgcggcacaccgccagcctccctctaaacgagcactataatgagccagtgcgtaaccatgtgtggtacagtaagcgacggacatggacgcgtgcgcagctggaccgcgagcgcaccgagttcttcgagacgcgcgttaccggcaggccggagatatgggccgctgtttccacggtgatatcgctgattcgcaacggtgacttggctactgcgcagggtattttagatgcggcgggcattactgttcccaccggggatctttgtgagggctgctacgatgagcaaggcgtgctttacagggttccacaatgtgttgttagtgatccggagaacatcgttccttcgtcttcgaggacggctagtgaggatggcggccctgctaggtatgaggaggagcaggatgttgggatgctctcagatagtaagctcgctgatgatgatgatgcggatgcttccggggacgagttaatttcgcaagatgttgaacgccgccgtgaggagaaggggaagacgagtgaacgggatttgatccgtgtgcttgctcgattgagtgatcgtggaggtccggatatactgctttccattggtaagggtcagactgtgggatttttggcgaggagagtgcatcaggaagccaaggttggtttttgttactgatctgttcatttcgttctctggattattgctaatttgttctttagctcgaggatgataggcgcgttcgaatcgcttacctaggtcacttgctgaatgagcgtgaaccgctcgttgaccaagggtggaagactggccatgttgtcaatgctctcatttcccctgttaatgatctaaaccttggacaccgatcttaagagacccttttgacgcatcgtcgatgacccaccactaccgccaacatcactctttttctcgtcctctctatttgaacctccagcgttctggcgtttctgtcatcggatctcttttcgcataataccccaatcttttttttacgttttgccatctacaacctggcatactctcattaccttagcatgatatctcatgtggtgatacccatactcgagtgaaagcagactggctctcaagatatcatcgcccccagctgtcgaattttgcgccccttaattacttgatctaacatctaatgtctccacactttccaagatttttgtgtcatattctcatgtaagtttggttacctatgtacatagagatccacaccaacgatgagcccgcatttcaacctagctcttccatatttgacctatcaccgcaagttctcagagttgttttagcgactccacgcgatcgacacatgcagggcatcacgtgccatgacgtacgtggagtacatgtctatcataactcctttggcgtacacctggtagctctttcaccccgcgtgttaatatcccacattttgttaggctttgggctttggggtaatgttcaacccatacagccaaaccatggactacgaggcagaccgtcagaaacgggaggtatatcgatatttccaaccggaaaatccagcggcgcttaatgcatcacttttccaatttgatgagcatctggctgcaataggagatttttcaagagtcacaaccccttttgtacccgatgcctctgcctcagagagaagttttgtcgaaggcagctctccgtcaagcccaaatacaactttgacttcttttgcacaactggccgctctacgcctgaacgcgcagcgtgcttttattacgtacattactctcctgctctagcgtggattctgatctgaccctttgcaaagtgtattgaacagcgactctcagtttatattggctgaagccacaagaaacaccaatcttaaaagctcaaggtcatccgttggggaaggggataggctcttcgctgggacatcgacattgtcagattattggaacatatgccaggtaggtcgatatctgaaatactgcgatattttacatactgacgtctactccttcaaataggagaccgttgcgattgactcagacaacaaagatggatcgtattcatttttaatcgtcaacgatcttcagcgggaagaacgattcagaggattgccttttgtgacacaagagccacactctcggttttatgccggaactcccctaactagtgatagcggtatcaacctgggctgtctgtttgtgctggattctgaaccccgtcaagggctatccgatatcgagaaggatacattaggaaaagtggcggagttggtaatggactatttattagttagtcgtcaagccgcagaagggcgacgggcctcacggctatcgcgtggtctccatcttttcgtcgatggcaactccagttttgccagcaacgctcacatgtcgtctcgatcaaacagctcagcacatagttcgtctccgcaggcatcacctcacctcagaacccgccaacctataagcccccaaaatgatgaattggaattttgctcagcacagtctggaccaggaaatgcgtctcgaaacggcgatgcacatcctatgagctcggattctaaccataatgaaatgtgtgctccccccagtccaacggaatcgttgcacagctcgcaacaggacgacagtagttcagaggattcctcgagcagcaaccactggcttttccaacgtgctgcgaacctcttgcgacaaagtctggacttggacggtgctggcggtgtcatgttcttggaggctagtgacaactcctctgaatatgtcgcagctggtcatagtgactctgctggatccacagatcctgctcctattcttgcgctgtccaccagaggtgatccgttttcataccaagcaagctctacgctgtcggatccagctgtcaatcttgacaacagattccttaaacagttgacgcgtcgctatcctaaaggaaaactctggtcatttcaccgcgatgggacgttctcaacgtcggaagatcagtcaacagacgattccagaaagcaaaggaagaagaccaaggcttcagagaccagcaaacttaatgagttcttccctgctgcatctcaaattatgtttgtcccactgtggaatgccacagattcccagtggttcgctgggtgcttttgttggactccccggccaacgcgggttttcagtcctgctgttgatttgagttcagtgtttgccttcggctcttctattatgaccgaatacagccgtgttgaatcggtcatcgcggaccgccaaaaaggggattttataagcagcatatcccacgaattgcgcagcccgttgcatggtgttttagctgcagctgagtttttcgggagtactaccttggaccagttccaagaaaccctccttgatacgataaatgcatgtggtcgaactctcttggatacaatgaaccaagttttagacttcagcaaaatcatgtcattagaaagacacaaaaaaaccttcaggcgtggaaaagatccatggaaaccaaaatcatctgaagacactgtgccgcgcctagatacattggttttgacagatgtggctctcttgacggaagatgtcatagacagcgtgtgcttgggtcattcccatatacagaagtcagccatatccaccaatcgtgccacagatatcttgtcaacactgccttccaaatcaacatcaaataccaacaaagttggtcatatctcaggagtagacgtcgttgttgacattcctgataatgactggatgtacaaagtccagccgggatcgctgagacgcttaattatgaatatccttggcaatgcactaaagtataccgaaaagggtcggatctctgtttgcatcgaggccactgagcgctcaaaaggtcgctctcgacgccaaggtctcgaagatatggtgacattgactgtctcagacacgggtaagggaatctcgaagcaatatcttcagaagaacttatttattccattctcacaagaggatccgctgtcagtaggcactggtctcggcctatcaattgttcgcggcattgtgaagactcttaacggaaaaataaatattcggagccgacagggcgaaggcactattgtcaaagtgtcgcttcctcttgaacgtctagtgggggaggaaagcccacaatcaacgtcagaaagagaaaattcggaccaaaatatactcacggcatcttctcaaccccgacgtgccagctgtaatgggaaacgagctgctatctggggaatcgacctgtctcatcttggcgagaatcagttctgggcttccatggctcggtatatcacggattggtatggtctaaggcttgttcctctgtctaccaatgagcctatagatattctgtttgcggatgaaagggatttgtctacaaaagaaatacacaatttcccaccagaattgccaagtctactcgtcttttgcagtgagactagcgattatggtgagtctagggcacaatggtcgcatcttgctggcactctggcaatcctacatcggccttgcggtccacggaaactttcccgtggtatcttgagctgtcttaatacaaatccgacagcccctacgttgaaaccgcagaatcccaggcaaggcttagtatttccagagcgacccaatcctacaggctcggctttgccaattagacagtccaatccctcattaccacgaaatctacgatcaccagatgctgaaccaccaattcccatggcggcatcgggcaattgcatcattggtcttacagggcgtagcgcttttgtatcgacatcgcgtaccgacagctctggccgcacaacatccgggagtactgattccaccaatcctgggtctttatctactcggtcttcatctgatggctctgatcatgtcactcccttgattgggagccaaagcaggcctcgggtcttggtagtagatgacaacaacatcaaccttcatcttatgatgactctcatgaacaaacgaaaagtcatggtcctagataaagccgaaaatggcagagcggccgtggatgcagtcgaaaggatgttgcagggatatgaccttattttcatggacatgtctatgccagttatgaacggatttgaggcaacgcgcgccattcgtgcaattgagaaagaacggagtgactgtatgccagccacaataatcgctttgaccggactcagcagtacacgcgatgagttcagggccctggactcaggagttgatcttttccttgtgaagcctgtttcttttagggagttatccaggcttattgatgaatgggaggccaaactgccgaaataaaatatggcgatctctatcttacttgatgcaggcttgccacccagacgtggaaggtcactttgagaattatcgtttcttacattggcgtttttggtttctttcttcatacccttgctgctatttgggctgcacatatcatggatgatgattgatgaatgatggcagtattcgatttcattatctaatttctgtctatttcgtcccatacagcttcaggggtaattatatctacagacaacacttaatggcggtaaattggacgccgaaaatgacactattgatgccattttcagcatcccttttactagaacagttgatcatcaagatcctgttattcggactggcttataccagcttatagggtgctggacactgggcgactaggacggataggcagttctagagagattaaaagcatagtcttggtaagtgagtggcccatctcttaaccttggaagtatgaacgcgaaagcagatgcagatcactgagcccttaatcgacggcttgaatatgctcaagcctctcaagtaagatttgatttgattgatgtactgcttgactgcttttaaatatgtagcctatgcatgatcaaggaaggactatgtactttccgtgacttttctctttcgtctttcggcggatcggcggatgatgtgaagccttatatctcaggcaagaaattccattacctaatcaccgatctggagcttctagacaaacagtgcaaacaactctatcgcaaagaaaaaaaaaataatttatcgcaatctcaagacagcgcagttcgttaatctcgaacttttgattgaactcaactcaattgcataccttttcaagggtagcctctgtataccttctctaagatcaaacgcccacctccaccttgatatccaggcttctcaatcgctagtcttgtcaatcctcgagataaaccgtaccaatggacggccaaaaaactccttttgtgagggagctcggctcgagtggtatgcatattccttttcttaatgcaaaactataacgctaacctatatctttagaccggaaagtccgcgacaaggctcttgagtctttaaccaaattcgtgcagtctcgcaccgatctgaccctcgttgatctcctcaaactgtggaagggcctgttctactgtatgcaccaccgctatattcgcgcggcataaaccgcagcaaaactaaccttctcccaggcttctaccactccgaccgacccctcacacaacaagccctcgcccgcgcactctcctactctctcgtcccctccctcccccacgcaactctccaccgcttcctgcgcgccttctggatcaccatcggccgggactaccactcactagaccgcatccggctggacaagtacctgatgctgatccgtttctacgtgggcgtggcattcgaggttctcgtgaagaacaagagctcaacaaagaacgcggacgggaaaaagcgcaagcgcgaagacgcagccaagcagggtcgcggcaagaagcagaagaagcaggccgaggctgaggcagagaccgccgaagacgaggaagagaaggacagtgccgaagacctcgaggctaaattccccgatctcgcggcttatatctccattatcgaggagggtcctttgtgcccgttgaactatgatgaggatcaggccccggatgagggagacccgaattacgtgcctatgccgcatggtcctgacggcctgcgctaccatcttattgacatctgggtcgatgagttggagaaggttcttgagtttgaggaggtggctggtgaggacgaggaggagactccgaagcggaagatcaagggcgatgtgcctattgagcttattttgaggccgttggagaagctgcgcgctgaaagtgcctacaagcctgttcggacgagggccgctgaggccttggaggatgagcggttgatcgagtggggtgttcggacaagaaaggccgacgaggaagatgacagtgaggaggaatggggtggcttcgaataaaaattttagttatagtaactgagggtttgtataaacagactgaattcattgcacagcgtgctagcgatatgtccatcaatggcatcacggtttgtattacaaagaagctggtgctagtcttacaggtgtaatggactacaaaatgtattcacatggcacctgtttcatttttttactgtacggcctgaccacagagtatcaaatgtctgatgtgacctattgacaaagcaccaattcccagggtatcatgagtggatgcaaagacccggcaagcaatggatatatagaagactcccaaggatgatagaacggacagcgactttcgtcccagaggcggaccgaaggcacgaattagcgaggacctgccgcctcataaagacggcctgatttggtgagtatcgtacccagtccctggtggacctcggcttggaacgcctcgaaaggcacccgttcaccatcaatactgatgtagccctccttcttgtggggagttagacggaacgcagacgctttgcggatattcagatctggcatgtcgaagaaacgaccactggggatttcgttcatcatactaatcgatgtaccaatgctgactgttccgtcaatagtgatcacgtctatcaggccgtcgtccggcaatgttgcagggaacatatttgtgtctttcgacatgatagccatatttcccgcatagaaattgcccatggtttctcccggaattacctcccacccctggggtagttcgtccgtcactgtaccgtacttgagctctggtagacctggggactctgcagcaatctcgaaacgtttggtgtcagcacccggctccagtggacgtgtagaccacatagcgtagtgttccttaatagcctccttgtcgccaatttccaccttgatggctatatcacaaggccatatggtctgccgcatcaaacggactaggaaaccgtatgtaaaccgctgagcgcccatccaacggatattctcagtactcaaatcacactcggcgacaataccaaaagattgcgagaggaaagagagtgtgcgcgaatttttctgagagatcgagacgagatccagcggggttctcagccccttgacgattgccagcgccgcaatagagacgctaccagtcccgaaggcattccaagtcaacccatttccagagccacatgggagaagtgcaacggcggtttgcgctagcgcttttcgagcatctggccgcttacccaacccattgaacacctcgtagggcaagccgtcgccagagcagcaaacgaccgcatcgtacgcgtcgatatcgagattttccgcaatttcaattgcatgacccctatgttccgtgttctgtacacccacctggcacttcgccgcggcgaaaaccggtgccgcatatcgctgatacaaactggcagctgtgcccttcccaccaaaaggattgaccaatacctttagccgtttgccacgcagtgccttgccatacgccatatcaagtagttgctgtacccatatctcgacaacccttttttcattttcggatatcgggtattggacggtcgttacggaaacatggtccttggcagcagggtgtgcgtaggcgatgacgagattagaagcggtgacttcggcgctgaggatattgtacaacgggatgtcatggttggtttctggatctaagatgcacgtacaccccggtcagaccatttccatcgacagtagcgcccgcgataacgcggtgatcgccaaaggggccggtatcaacttactagactggagtaatccgcagcagcgacggtctttgcgaggcgagcggtcatctgcataggtaagcatattcccacacactgagtgtggagtaagtagtccatacctaatatgaggagcgagttggcggcgatggtcaaagagacagattggtcgaccgtcagggttgtgccatgcagctcctgcgaggagccgtctgtggaggacattttggataagaatgaagattcaggacattatagataaagaggaacagaggaatagaggaatataagaataaaatactctaggggaagaaaggtaatgatagacaatgaaaatgcccgtatgcagccgcggagttccggtgggcccggggcatgtggtccctgcatttgaaatatgtacgaaggatgaagtatagagtaagacatttttatgtgcataaatagatagatctctctttagaggctactataatgccctgggaatatcaaaagacattgttctctatccactacgccggacgagatattcatctcatctacacaataaagagacatataagtaaaaacaaattcgtctcgaatgaacaacacagacagaagggagggggaaaaggataaaaagcatcatatagaccgcaaaccgctggaaaaaacattgacttatgcagtcgctgccttgagacccttcagagagcccaagctcagtgccaggccttgggagcgacttcttatccgcacaaatcctgtaattggcccatcgtctccctccttttcgatgctcaagtttgctagtgcatcctcgcctagtcatagtcagttagtatgtcaaatagaaaggggtagattattgcaaacataccgaacacgctgcgggcatataggttcgcactcaggaagcggcaatctcccttcagcgaagcatcgggcgtcaagcaggccatattagtgctttccatcagctgcttgaggaattcacggagagtcttggccttcgaattgatgttaaccttgttctcccattcgaactcagtccacatggtacggaactgagtctcggtgcagtgagcaggctggatgtagtccatgatgtcggcatggatgtcgttgaggatgaccacatgggtctcggtggagctggcgccgtcatagacaatgttaccaaagataacaccagtgtctgttgatgaaaccttgaccgtagcctggacgttcaagaaatcgcgtgggcctaggttgttggtagatggccgctcaacgaccttgaggtcaccgagagttgcaaactccacgcacaggttttgcagagtttcggttgtttggttaaccaacaggacgtcgagaacaatgtcgaactggtgaacggtcacataggcttcggcatagactgaatcggagaaaccagtcaattgcaccacccggctgagcttcgaagatacgtcttccacggtcgaatcgccaccagttgccttggcaagatccatttcaatctcctccccgccctcgacggcgttcttcttggtaaattggcgaatggggatggcatcgtcaatctgcacggcactcttggctttctccaccgcctctttggcagccctcttcttatcctcgacctggaccatggcgcggaacgcctttcgggtgtcctctaagaaagtaacttcgagctccttcttctcggagaactcggccagggatcgcacacaagtcaagatacgatccacagaatcctcatcaataggagccttaacgaagtgagattggccaacgcgcatgatggaaatcataataagcatggcttcggcacggagagcgttggtacgagcagtatcttgcgacacctcggaatggcgcatcaccaacttggtcaatgtcgaagagagcaccgttgccaggtagtagtcaccgtccaagataagctgacgcagaggaggcttctgcgcggccttgacagcctcaagacgagctgctgctgccgattggctggtgagagcactttcggtggcataggtgccatctgcaagcacctttcgggatccagtaggtgcggccttggaatggccattggcctgctccatcagcagggcgttgtcatccggaacctcatccaggagtcgttgttcggatgccaaaattgggatttcaccaaggctggctctgatcgtcctccaagcatcccgaatatccttctcctccagggagtattcaccaacaacccagagaactccgcggtaaacctttccagctcgaacctcactcaaagttgaaaccaagcgggcaacgattgacccacgcaagtctgggaatttctccacgacctctttaacgaacgagatcacatcgacagcggagttattattgaagtcggcaataaagtccatcagaagatcaaccacgctagcagcaatttcagagaacttgatagcgcaggagtgtattgactgtaccaatatttggcgatactcgctattctgtggatgtcgttagtaatgctgcgttgcgcaaagtgagcgtacaacctacctgttcatattgttcgtcgacggtcttggcaagttctttcttgagcagcatgatgatttcttccacattcttgctcgagaccatctccatagcaaggttgagggcctttctccggacatcaatatcagggctgctgagaacccgcagggcctccatagtcaagtcgtccaagacaccctcattgcgaattctgagctggtccacgcgttccaaacaaatgagcttgacgttgttgtcggcctcccgaatggcgagctcgatcagcttgctcgcagctgctttgacagcaacggggttgcttgtgagggcggtaagagatgttgcggcttcataaacaacggtgctagtgggcgcgtcgaggagctcgagcataagtttcaggtatcgcgactatttttcgttagtgacccaacactttgatttgagtccaataaacgcaccttattctgagtgttctgtactgcgtccttccggaggaactccaactcggctagctggagcaactcatctgtgtttggaattgtgtcaaaggtggtgcgcagatactcgagcgccttctggtgactgatggacatgagtgctgcaaaggcattgcgcttgcaggtgctgtcggtctccgattcgaggaacaactgaagcaactccggcgcatcgggaatgagcgactcggagtgctggaaaatagacgacacagcccagactgcattcttgcgaacataggcgtgacgatgttgcagacacgaacgtgcggaggagaggaggggctcaataagctctggttcgcggagtttggagaggaatcggagggtattgcctcgaatgtattcgttgggatgttgaagatcgttgcgaatgccgttactgcgaaaggaaaaattgtcagacaggaaatatcatatagcaatggccagggggatccttaccagaccaggatcatctcttgcttgagcttgccggtagaatcgtgtttggggcagatttcatagaagaagtaaagcaacttcttcaatgacttgcttttcgacggcatcacgaagcgaatgatgtgcatgaggatttgcggcattgggtctccattcagcatgatggtgacaattgtccgcattgtttccaacttggtctcatcggtgcctttctccagttgcagctttagctcctgcacggtcggctggtcggcagtattgtccacatggagcaaactgtaggtattttccagaaacgacgccatggtggtggattgggaggaataggaacgaaaagagctgcgagttgtcagttccggggttgttttggggacacatcagcatgtaggaataaacacatacagtagaggtaattctcccgggaacaggagtttgcgccagatatcaagaacaagcaattagtgtaaagcaacacccctcgccagccctgaaatcattagatgttatatgatgcgcaatggggagggaccatcaacttgtcccttaatctggccccccggcgccgtctgtgtggatgactaagccacaacccgccgcttttcaactgccacttcgacgtcgattgctgtccttcttcattcacgtacgaactctacgattgagattcgccaggatgtcgaatgagaatttctacctccgatactagtaaggatgatatgagtgagcccgggtttcctcagctgctgacggtcctcacagctcaggtcactctgggcggtttggacatgagttcctaggtaagcctacgtgccggtcataaacactttcctctacgcagtcgctaacttgcacgcagagtttgatctccgcaccattggcgaaggtagcagtgccgccgtacgatatgcgaacaactcgaattaccgcaatgattccctcatccgcaaagaaagtgagcaggagcatacacaccaaatagaaacgaacacgggctgatatagtaatagtgtgcgtgagcgatgcgatggtcgaagaagtgaagcgcattatcaaggatagcgagatcctcaagtatgcacctggattacacaacaggaagaacaccctcgctgaccccatctagggaggatgactccaagtggccacagaagaacaaggacgggcgtcaagagctggagattcggattggaaatgagcacatttccttcgaggtaattgaccgaggtatttcacggaagcagccatcatctaatactggatcgtatagaccgccaagatcggctcgctagtcgacgtgaccgaatccgacgaccccgaaggacttcgagtcttttactatcttgtacaggacctgaaggcccttgtattctcgctgatctcacttcacttcaaggtatccacaatcttgcccccatgcttgcaacatcttctgaccatccctgctttacagatcaagccgatttaagtattgagcgcataaaagaaaattgaagaataactgggtttttttgtttgatgatactcattaggcgttcattgagggttacctgggatgcgaactcaattatagcgcagaaacaatgagattgatacccctcaggcatgtctgccttcgatcctttctaggcaatttaattattctgcgtgtttgtagctgcttgtagtatgaagatgtcaaagcaagatgcaaaacatggcagaagatacgtagcttgagaatgtgtgttctaaccttaggtcccaggagtgtctccagtccagtcctgcaacgcttgatatatatccacttccctgcaatgccaagtcagcactaattcctcaagcttgggccaatcctggaagtccctcatattcgatcacctcaataacagtggtcaccgggatactgtcgggttcatatttgacgatatcgggaagtacatatcaggactggggtttcacctgggcatccagattgggcttgtataaggaaatattgaaattacttagtggttagtaaatccaaagtcgcgcttccttcaactcgtcctcgaatgcccaagaatgcctaagatgcccaacctgtcctgatttggaccgaatgttggtcatgccattgatctttccaacgtgcaagattgtatacaaagtggatgaaagccgttgattggcttgattggcacgtggcctgaggcatccaccttacataaccaatattgaaagtggcgccgcgccaggcgcagaaacagctgacccacctggactgtccccgcattgctcgttcctcaagccttaaaagacttagttcgctgatctcaaatgatccatcccccttgttctctgtttttctcacaattttgctctggagtgtcttgcttcgattcaatgtcccgtcccctctttccctgatttgcaatgccgactccgagtaacaactcgatcgccgcggcgatcgccgcccgcacgacatgtccaccggagcccgaaaggatctcggcttggcgagactcccccgatagtgtatcgaacagcgatcctatcgatgctatttcacctgataccccaattgcgccctccatgctgagtcgatctgatgatgccggtactcctgagccgatgaaagcgggaggaaagccgacgggcgtcgaggaagatgacccagtcagggctacttcacctgtcgagtcaacctgccttcgcagccagtcaccagcagcgccctcgggatcctcactcctcaactgggaattctccaacgttcgtgtaagtatcgaggtcggctatatccgaatattctcaccttctgaccatcgcattagctcctcccgaaccacacctcgtttctccgttcaggcagcaagttcgctggaactcagcaatcagaccgtcaagtctacaatgtcgatgtcgagattaaacatgttgatatggccgagtcttatctctgtggctaccttagaatccaaggtttgtgattcgtgcgcatcagggacgtgcattgaaccttgctcaactaatgtttgttgttctccacaggcctaacagaagatcaccctaccctgactaccttttttgaaggagaagtgatcggcaccaaacacactttccagactcgtaatgaggaatggggcgcctcggaaaagacagacttgcaccattggtctcggtttcccgcctggcgtccgctggctaaacaggccaaaagagcggatttcacataccgcaacttcgcccagcgtgaacatatattcatgagatggaaagaatctttccttgttcccgaccatcgagtacggacgatctcaggtgccagcttcgaagggttctattatatctgcttcaatcagattgagggaactgtgagcggtgtatacttccatgcaaagagcgaacggtaggtggatgttttgttgctgaagattctcgatttgatcctaacaccatcacagatttcagcaacttgaacttaagcacgtcgaagatcgtggatgtgcaccagcagtcgaattccgctaaatatggccgaacttgcttgctagtgccaaaacgatctcatatatgacttcgtacgtgactaattcggtcctcgtgtgtctcatatcctcttttgttattatttccgatactacacggctaagtagtgtttcttggtcaccattcagaacgagaagcttggttctctcggaactccattgagttcactatcccgtttacctttcctcaaataccctctacgctctcagtctcctctcccctaaggctattggagtgttgatcatcatttcgacagctcatttcatgaggatttccaagaccatatccattttcaggcaaagtctaaatccacacaaatcatcctcagattgaccctcatgtttcacgatatttcaatatacgaaacggcgtttccgtccccgattccggcgacctggttctggttacccttcgtcctctttggagtcctaatctctcatttttcacttcttgttttcttattcctcacctatcttctgttaaattagtgttattatctttcatccaagctgctggttgaccagcctagttattgaaaaacctcactaggtgtgctttgtaatcgtatatatgctcttagactctagggctgtattgatattgctattggcggctccttcgctgttccatccatacaatagatcacagcgcaaagaaacgggcattcttagggactatagtcggctcacaactgccgattaaacactaattaggatgaccaacatctgtataaaacaacggctgggcatgtatcaatcggacacgacggtcgatcgttgattgttcgatctattcctcccgtaatgtacagatgaaccaagtgaaacacgtgaatttagaacaaagcacaaatacgattactacgtatacaagtagcaaaaataaccatgcgagaaacgagatactaaagtagacttggtcccaatccgtttacgtccgagggccatattgagaaatgccaaaagatcgttgcgccccagatagaaactcacgcgtgaaaacgaaacaaataaagaatcaaggaacccaaagaatgcatggacctgagtttcaggacatatgtgaatgaagcgatggttgcagtaacatgagatgacgttatggtatgacttgggcgaacagacgttaaagcaagaaaaagaggcgagcaggggtatcacatgcgatgccagttgaagaatggcgagatcgagcgagtttggatagaaaggacgcttttagattccatggtaatcaatgttcagatgtggtccacatagagagggcgacaacttataaatagagattaggaaggaaggaatggcgcgagaaggagaaaatcacatatatgccgagttttgacgagagcttgagttggaaccgccgctgctgtaatcgctcggagtaggagactccaagacaacttgttgacgaatggagatgatccattcgtgctgtaggagctcggcggcagtggcgcggcgagcgggatcgcattcgaaacagcggcgcacgaagtcgacaccctggtcgctgagttgatcgcgagatgggagcgcgggctgtttgccttgagcgatgttgtacataattgcccactcgttgtccagcgtggaccatggccggcgcccagttgccatttctaggaccacgcagcccagagaccaaatgtccactgcgccttcgcggttgtccagattcgcatcgccacggatcacttcgggggacatatacatcggagttcctgtggtggtcttctggtttttgcgctggttcgtgggatctttggccggctccttgaggccagctacagggccgtctgatggagcaactgtgcgacccgagcgagcgatgatcttggctgcaccgaaatcgacatacttaatgacaccgttgtgatcaagcaggatattctcgggcttgatgtcacggtgcacgatatgtgcttcgtggagatacgctagaccttctaggagttgaagagcataaaccatgatgaccgtttcgtcctcgatacgtccgtgctctagcaagctagcgagcgagccaccggagcagtactccatgaagatgtagaccttgtcacggtgcacctcgatgccgtgataggagacaatgttgggatgatcgagcacttcaagcacgcccatttcgtctcggatctgctgggcgatcttgggaatgagctgggggtcttgcaggcgaatttccttgacagccatcaaatagttgctgtccaagttgatagctacatagacagacccaaaggtaccaccgccgatgaactggccttgctgccaacgcagagtgacgttggtagccgacgatgacagcacagtgagtgacctgtcagcctcatcagatccttctagcacctttcctagagcctggcgcttcgcatcttcctcgattctcctatcttcaatctccacaacacgcgcgtaccatgtgtcgcgaacgagttttgatgcttcctcgtcactagtgatccgaccagcgccaatctgtcgggcgccgttgcgttcttccatacgtttctcgttcttcgccgcaagcgaggatcgtgcacccatgatgtcgaagtgagagatgagaagggacatgcatcccgccactttcaatctgaaatcactgaactgttcttggtccatagacagaagatgtcggctggatgtgatcgccatagcaaactccaaggctgctacagcccacttgaacgtctttcggtccgcagcgtcacactcatcacagatgaacgcgacccagtcgagagacaactccactagccgggcgctgttcatagcacgcctgttagcgtcgacatagttggaggaccgttttccaaactctgttgcgaatgcatagcaggcctggatcaaatcattgttctgccagtttctctcattcagctgatctttgatgatagccacactatccataatggtcatggacagtttgaaagagatcttcttgatcttattcaactcgacatttacacgtccaaggtttgcacgttgttcaatgaccatatcaagttggatgcccgtgagtcgtgcgagctccacacgtgcattctgcagtcgttcttgcatgcctccaacaacaatacgtagcttgcccagcctcacatccgttggatgttccaagaactccatttgcatttcctttcctccccaagcaagaggcctttcgggtcggatggccaggacatagggaacatggatatcctgggttggatcatcttctttgaaggaggtagaaaggataccctggatatcagcgggacggttccataatgcatgatgtgcaatcagatacactcctttctgcccgacggatttggtagaggtgacaaggaaatggtcagaaattaagagtgcctcaaagaaatcataggcgatatagctcgtgatgttgtactcggtagcattttcaaacaattgacacagaaacttggagaatcgatagagcttgcgctgacgaatacgcgttgaatccaagatgctcttgtatcgtttgtccatatcctgtacagtttccttgggtcgcgggacgagctcacgctcaaaatggatcatgagacgctgcaatgatctggcagtgagggcactgttgttctgttagttctggaaacgatgcaaagcacgggaaccatacctaaattgctcggccacctcaatatctccaccgtcaagccggcaaccgatatcataggagaatccccattcctgttctagaatttcggcctctttgaaagtgtttttgttggcattcagcttccaattgaggagccggaaatagtatttcatagcatccaataccgaattgtcaaagttttcatcgacacatggcggcaaatcccagccgggttctggcctcgatacatcaaggtagcgaaatttgatatcgaccgccactttcatcaggatttggaattgggaaatcatctgatcgatcaaaatgggggcttgctgggctgggtctttcatgttcttggcataggacagacggactcgaatgatttcctggatcaaccgagagggaaagttgatcaaagttagtagttcttcgatatatggtggcaggtgccgcgcagcaaatgcttccgagttctcaattaaagtagtctttgctttctggatgacgacgagaatgcgaagaagcatgccatccttgtcctggagcgtcttcaagccatcttccttcataatgcgatcaaggaaggacgaaccatccgaaagatcgtcctttgcagacttcatcctcggctggctgaaatcgagagcctcgttccctacccagctctgcagcacagccaactcggtattgatgagggccgttatgttgtgccacgcaaagatggctgcgcgactagaggtaaattcctccgaggcaacacgggggttcgccagttccatttccttgtgcgaagagtagagaatctcgcatcgctcgaccttctccacaatatcctcgacttgctgttttggcggttttccgatctcagtctcgcctttaatctggaatccaatgatatcctcaatcacaggacccagacgtgaccgtgcatcctcgatcaactttcgctgcagaggaatacttcggccgcacgtccttgcccgaacgccaatccagagtgcatagctctgggccgccgaccgctttgactccgcggatccgatgagtcgctgcttttcttgtttcacgacatctcccttcaagactgacgccagcatggaatgccactcaagcctctcctggttcttgggatgtttcaattcttccgtacttggtagattatcgtccgggaggaaaagttgagtatcagggtcgtaagaatcatcttcaaacggcacttcggaggatggagagggttcctccaagtcgccatccccttctgacatgaggtttgattgtgagtccttggaatggtgataccaggcttgtgggttcgctcgaatccgttgaacgtaggctttctcttgggcacgatattgcgcgttcggatcgcgtcggttccctcgtttgactgacgatgatcgttggcggtcttcctggagactgatgtattgcggtgggcgccgctgtggggcatacgtatttgatggcgttcgtgccggggcggacgggcgctgagggcgcaaatcgttagaaattgcatcaggcttctcaaggagagtggtagcgccaatgctaattccacgtggccgtgctgtcggtggattagaccatggggtaataacggatgagatgttcggaggggaagatgtgatggtgctcgcaggtgtttggatttggtcgtccatggtctctccaaatgatgagttggctctcacgggatactgggggaattcatcagaagaagagcctgagccatccgaatcagggctggggatttccggatgctgcatgatgattatcccgtgtgatggtccgagagagcacgtctggtgttggaccaaggtgataagaggcgaacacttgtggcggtgcattgtggctaaccggatgacccgtatctccacccattactgtttgatctactgggaatctttcctattttaattctcatgttgtaactacgtggcatcaaacttgatcctgtatttgtatgaagtccgagccctactacagaatatacgcgtccaatcttcagtcagctgctccattgctcagtccgtgtgatctgtgatctcacaatatgctccatccttgtaaggacttctaatacttgctttttcgtggctttgcattcgagattgtgaaaattacatacaatgcataattaatccaagattgtaaataagctctatcaatccttttatcatctcgttctgctttgttatagtttacgcttgaaattggtaaaaatatatttctgtaaaacatattttgaaactcttgagcagttttatatagacttcattgggctagttacaaggctttttaacatctgcttagtaaattttctatattctaactaattactccgtagttaactaactagtacgtagttcgagaaggtgaattccaaggcattacatagtcccttctggaatgtgaaggggctcaagtaacaaaaaggtaaatagaaattaacatacagtcattggttaacgagccaaattaagttgcgagaaatggtccggggtaagattgagattatataagagagtgtataactttctcttcggatcgttctgtgaacaggtagtgattagtaagtaagacattaaagttatgggtaattcgattatattcctgttcagataactagagagccaatgtcttccgagaatgacatacctactgttgagtggttgtggcaccacgatgggtgaatctcaacatgagaacgccttttgtgatatttaatagggtatgtatacgttcagatagtgctaagaccctgttggaaagaggaaagagaacaaatgacgtacattgtatgtaggcatcgagaaaagtcgaatcatttgaactatcggacactatccggggaactagttaaagaaatgagcatgtgacatgactggacatgctagaacttcaaggttcgaggagctagtgcactattttcaaactattggagatttacccctgactagagtaacattgcgtctaggtatggagtacatacatcgatcgtatgtacatcgaagagtcgatcagtggatcggtgggttcgagaatacttcattgaagatcattgatactttgcagcgggtcttaaggtattacctgcatagtctaatactctaaaaagcgttaagatgcaatatattccctttccttgatcgaaccagacccaagtcactgggcatcggaatagagcatacagcacggcaaaactgacctatgatcgagcctacgtcatagatacatacgacgatcgaacatctgatgttgctgaagaaaaatagagcaagaagaccaaagcgcaagagctccgcatgtattcacagatctacgatgatttgatgttgagcacggagtagagttcttggcccgagagttcggcacatgccgggatgccgaatcagcctctaaaaattcccgccaatgaaagcgtgggtgcttatcttgacttgatgtacgggatactttccttggttgtagaccctgtggcaaagagtttagttttcccgccccatgcgttctgcattgtcgtgtggaaccgggtgtgacattcccggagaatggggaatccactggacgatgcggagagaatagcagaagtacggatcctgaatagttatgtatgttgtataggtagattgctatgcgaaacatctatgttgtacgaagaaactgtacactgccaaagaatcatttctatcagcaattgatctctgaactctacatattttgccgtctggggccatccttggtcaatacgaaacagttcaagagataatccctcgcatgtcaaagaatgtatgtatccatggatacgatgtagaattgtaagataagggaaatggcagctgtgattggttggcgcaacacgagacttgagccccggtgataagagatcaaacctccaagggttcaaccacttcacgttgcacatggtaatatcctagttaaaaggaaactcatatatccaacacaccgggtcagctttccatgggtcactatgcagacacgaactggacgcattcgacaaacggattaagcgacagaaaagcatgtactggcccgagaatgataagcaaatggctgtgattggctgctctccaacctcatatctacagccagtcgttgcgggcccgtccaatttcgattcctagtattctcttctgtcagtgaaatgactccaatctatttatcactttgctacaacgtaagttggacctgcatgacccctgcttatcggagggtcaatgcatcgcgtttgagatgttcttcgcaagggaaaaggcagagatgtcgagaaacaaacaagtagttacactgcagagtaaacatggcaaaagcacatacccatagtccgtccgcagtgcaatgtccgagtatagctgaaggatgccaacgcaaggacccgtaattccccggtctgcgtccatggagtgtataccagatcccgccataaacccggcatggctgaaattggggcgggcttggccacctgctatcggtcaatcaaatgaatcatatcataaatgagaatgaccagcttccactatcggaactaagatcgatggtctggtagacttctagcgtcggatggtggagtcatccttagtttttctgggacgctgccagttatttaattaccagtgtttgtccttgcagggtagacatatcacttttctctcctttcactttcacagcccggtgcgtgaaagtattttctatttcttcttctccacctctcacaacgcaggagatctgtattcagttctactgagactgtcgttcgccccctatcacacttgaaataaaattggcctcgcctaggtctcactatggctgaatatccggttgcgtacaatggcaccaccgacactggtggtgactcgcttcatgatgacttgaacatctactacagtgtatgttgtataccccataggagtcaattgagacgcgtgctaactaaagtgtggatagtctggtgatatctcatgggtcattgtatccacagccctagtgttgctgatgattcctggagttgggtatgacttgacccatcccttcctacaccaaagggctttcactcatcactcgattatagattcttctactccggtctagctcgtcgcaagtcagcactctcgctgatatggctctcgatcatgtcggtcggtgtggtttcattccaatggttcttctggggttattcactggccttctcccactcagccggtacctacatcggtaacctcgataacttcggcttcaagggtgttctcgccgcgccatctgtgggaagtgacaaggttcccgatctcctgttcgccatcttccagggcatgttcgccgctattacgtgagtcactcatgcatccatcatggagatactcggaacatcaattgacggtttcttcttagtgttgctcttgctgtcggcgcagtcgctgagcgtggtcgcatgctcccctgcattatcttcatgttcatctggaccactatcatctacgaccccatcgcctgctggacatggaactcgtcgggatgggtgttcaagctcggaggtcttgacttcgctggtggtacccccgtgcacattgcttccggatctgccgcgctcgcctactccctgatgctgggcaagcgtcgtggccacggaacccacgagctcaactaccgccctcacaatgtcacccacgttgtcatcggcaccgtgttcctgtgggtcggctggttcggattcaacgccggctctgctctctctgccaacctgcgtgcggttatggctgccgttgtcactaacctggctgcctccgttggaggtgtgacctggtgtttgatggactacagactggaacgcaagtggtcgaccgtcggtttctgctctggtgtcattgctggtcttgttgccatcacccccggctctggattcgtcactccctgggctgctttcatcttcggtgtggttggtgccattgcatgcaactacgctactaagctcaagttcctccttggagttgatgacgctctcgatatctttgccgtccacggtgtcggtggtctggttggaaacctcctgactggcattttcgctgcgtgagtgaacctacttcctgacagtatagtctgatcataaactaacttccattatagtgattacattgcgcatctggatggtgtcactgagatcgatggcggctggatcaaccatcactatatccagctgggataccagcttgccgactcggtcaccggaatggcatacgccttcttcggaacctgtatcattctcttcatcatgaacctcatcccgggtcttagcttgcgcgcacccgaggaagatgagatcatgggtattgacgacgccgaaattggcgagtttgccgtaagtttcattattcctaagtcggccacaacgcgttctaacattttactctatagtacgattacgtcgagatccgccgtgatgttgtcgatggcgttgagagctcagaaactgcctccaagcgcactactacacccaccggcgagattgacaccaaggcttagatcagacttgatctgacggctgttctttctttaatattaatatgaggcaactgccttccttcccttctttcttcccttctttcctttcacgttaatacttctttttttcggcgatggcagagtgtcttcaatatctattaccgaactatagatatttgggatactctccggagaccaactttcactttgatagcattcagatacccaaatatcaaattccattcaaccattccgggcagcaaatcaagttaatagagtaggcaaagcgtgacaatgtccatagtagtgcatgagtaatatttgagacaaccccagacaaagaagtaaccgtgagtggcatgccattgaatatgagaatcctatactttagccaatgatgtactcttacgtcgtatactccgcatgttgtagagagctagaacgcgggatccacccatgtgcacctgccggagcgccgcgccgagaaacacggcgaccggcgaccgtgtactgaatgcgggcaatcatcgcaaaccctccacgctcctcgcaaccctctgggcacattttctcttccttttattcatctctcccatcttccgaatagtttgcccatcgattgtttcatcaaaatgtcctttccgaccgacgtggcggagtttgatagtgacccgcgcatctcgttctcgagaccggacaacagcttcctacttgagaccaaggatggtcgcgagttcttgttcaataccatcctgaagagatgggtcgaatcggtatgtcatacacgtattggcacgctggcgctttgcgctgggctgttcgccgacaatccccgctaacctggcttgcgactctagatcgacgagaagctcatccgccagcagcaaggatacggtcccgaagaccccgagagtgagatcgttcatccccgcgatcgtaagaagcgaaagcagtcgcaggagccggtaagtgttctggtcatttatgccaacttggtcgcattgaaactgacttctttcgtctgctagaccgatgagcccaaggtcaagaaacctcgcgtcaacaccgctgtgtgggttacaaatatccccaccgacgctaccttctccgagattcacgagtcgttcaagaaatatggcatccttgcggaggaacttgacactggaaagccgcgcattgtaatgtacaacgacgaaaacggcaatttcaatggcgaggctttggtcgtgtacttccggcctgagtcagtcaccctcgcgattcagctgctcgacgagacggacttccgactgggtgtccccaacccatgtggactgatgcgcgtccaggaggccgacttttcgtacaagcgtgaacaggaagcggagcccaaggttctgactaccaaagagaaaaagaagctgaaggagcgagcagatcggttgaataagtatgtttgttgatcatggcagtagagtgtttcatactgactcgactgtgataggaaactttccgactggggtgatgatgaggctgagcttgccgccaaagccagacaggctgccgaggaggcgcgcaaacatgtggttttgaagcatatgttcacactggaggagcttgaggtttgacacacctcttccaaagttgccttgcgcgaatatggaacccagctgacctgtaattataggaggatccactcgccactattgagatccacgaggacattaccagcgaatgcgctaagattggaccggtgctcaaggtcatggtctgggacggggaggctgatggtgttgcgaccgtccgatttgtgtccgcagccgacgctcgtcgctgtgcccaggtaggaatctcagtttgaatcaatgtgattgcaaatactgaccatcttctagagcatggacgggcgtatcttctcaaagagaactattgttgcttacatctggaatggcgaggagaagttcaagaagcaccgtccccgacgcgacaaaaaacccgaggattcagacgatgagaatgagcgccttgagcggtacggagattggctcgaaagcggtggaaacaagacaagcaagaaccaggaaaccgaaaatgagaaggccgacaaggacgagaccgacaagagccaggagaccaataacgagaaggctgacaagaacgaggctgacaagagcctggaaactggtaatgagaaggtcgacctggatgagaccgacaagagccaggaaatcgacaagaactagctcaaccgaacagaaaacagcgcaagcaattccaccgaaggagcccagaacggtgggaactctgtaccaactgagctaatttcaaacaacgagtgctactgaggggcaagcgaatacttccaagtgaaaggaaagccacgcccaactgaacgatatccaaacgacgagagctactgagaggcgcgcgagtacttccacgtggagggaatgcggcgcccattgaacgaatacccaacatgtatcatatttttcccaattgaaaccattgaaatattattgtactatcttatgtagttgtagttgtagtgaagttagtgtatatagacatagcaaccgaaataggaagtacaagatcacgcgccaaagaaacgcaaatatggttcgcacctccccgagtcccgtgatgcggctatacccaatcgggccccctccccctgaagttcagttgttgacttgttgatcccacacacaccgctcaactggccctcttgctttctcttcttccccatcctctctgacttgtcaccggtcatcctttttatttccatctcttttctaataccttcaaaatgcgtgagattgtatgttatccccatccagacgcgtctttgttttcatatggcccctgagccacgaccccactctgaacagatctttgctaacatgctctaggttcacctccaaaccggccaatgtgtaagttcgacatggaacattcctagaaacattcttcggctcgtgggactaaactggaattgggttatagggtaaccaaattggtgccgctttctggtaagtgccgagcctttttttcgcgttgggtaccaattgacaaattactaactacattacaggcaaaccatttctggagagcacggtctcgatggcgatggacagtaagtctaaagatgatgggctttccggtggttcacatgtctaatatcttgctaggtacaatggaacctccgacctccagctcgagcgtatgaacgtctacttcaaccatgtgagtaccgcgactgggcattgattaagcgtgcaccatctgatcggatgttttttcttaatctaggccagcggtgacaagtacgttccccgtgccgttctggtcgatttggagcccggtaccatggacgccgtccgctctggtcctttcggcaagcttttccgccccgataacttcgtcttcggtcagtccggtgctggtaacaactgggccaagggtcactacaccgagggtgccgagcttgttgaccaggttctcgatgtcgtccgtcgcgaggccgagggttgcgactgcctccaaggtttccagatcacccactctctcggtggtggtaccggtgccggtatgggtacactcctgatctccaagatccgtgaggagttccccgaccgtatgatggccactttctccgtcgtcccctcccccaaggtctccgacaccgttgttgagccttacaacgccaccctgtccgttcaccagcttgttgagcactctgatgagactttctgtatcgataacgaggtatgaagtgcgtcggaaatgctgacatgaagaatactgacaattctaggctctctacgatatctgcatgcgtaccctcaagctctcccagccttcttacggtgaccttaaccaccttgtctctgccgtcatgtccggcgtgaccacctccctccgtttccccggtcagctcaactccgatctccgcaagctcgccgtcaacatggttcctttccctcgtctgcacttcttcatggtcggcttcgctcccctgaccagccgtggcggccagtcttaccgccaggtcagcgtccccgagttgacccagcagatgttcgaccccaagaacatgatggctgcttccgacttccgtaacggccgttacctcacttgctcagctttgttccgcggtaagatctccatgaaggaggttgaggatcagatgcgcaacatccagagcaagaaccagagctacttcgttgagtggatccccaacaacgtccagaccgctctgtgctccgttcccccccgtggcctcaagatgtcttccacctttgtcggtaactctacctccatccaggagctcttcaagcgtgtcggcgaccagttcactgccatgttccgtcgcaaggctttcttgcattggtacactggtgagggtatggacgagatggagttcactgaggctgagagcaacatgaacgatcttgtctccgagtaccagcagtaccaggaggcctccgtctccgaaggcgaggaggagtagtaaggattccccacatcatccggctttcgaacataacgactaacgaatttccccctatttttagcctcgctgaggacattgttgacgaggaggtttaaataaatctcctttgagatttgttcaaagtaatacccttgtgaagcctacattctctaccattcggaccggctttgtgggcgtaagccgcgaacccaatttgtttgagcgctcctaatttacacccttttttgtctattttcctacttggcttgggtgatttgttcgacccctccagaatagcacatagtggaaatgactttcaatagcttttttaatcatgttaattgtagtgaaggattggtgcggcagaagttcatatgggccagtatactagagttcataacttcaaagactatgtcgtggcaatctcacataaaaatgacgctaagtacacctcgtcacaaccgatccctgcctttctttctacagttcaatggaagggacatttcccagtccgatactccttgaactccaccagagtctcctctaactgcttcctccccttcccctcgaaatacttcggtccaatatccgcaacactatatccagtgggataatacttatccccctcgtcacctggcacagcccgccctatagcccgcgtcagcaatgccatcgggccccagcggttccagaatgtgggcttgacatagtacggcgcagcctcccactcggtaaggaagaagcggtcgttctcatccggctcctcagtggacgaagcgaagcgcatgaagtacggtcgtggcagagagaggtagcggaggaatagcctgcgggctgtgaagatggttgagagaagtgctgtgcagaatgcggaggggggttcgtagctgtttagtcagtagttagaggttagttgcgacctgaacatgcaaaccaaaaccaagaaagaaagaaacttacaacatcgccttcctaagcctatcgtccatcataaacgaaacagcctgcaacccagccggatgaaagaccttaggtagcatataaagcaggacagcagtagtctgatccgccgtctcacgattcttaatatcaggcaccatgcatctcacctcatactcatcagcccaagcagtcaactcctcgagccactgaatcccatcctggaacccgactttaccagacggcagtttctcatagctaatatccagcgcatcaccggcactcttccagaatgtcccgatagcgcatcgctccaggtcactcagcttacgccactcatagcgatcgatgaagcgaatcggctgcagcgcgaacagcgccagcgtaaagagcatatcgtcatcgaggatcttaccagaggccctgtacccgctgtgcaggtagcgcgtccgggcaagaccgagacatgcgcgcatggaagtcgggttgttgccgacccattcttgcacgaggaggctggtatctgtgtagcgcttcagggaggtatccgggttggagaattgggttgtttttgcgaggaggcgggatattgaggggatcccgtatgtcttttttatagttagaaaatgcatgtgtggatcggtagatcatgacccggattgtgagtgtttgcccatgtgggtgggttggtaactggtcttgtttcatacccggaataacgcgaattgtaagctcttgatgaatatgaatgggaattcgagctgcgcgacttgtttttggatctggaaggcttcttcgtcggtcattttggacattgactcccgtgttggataggcatattgtttgtggagcttgcgcaggcgttggaatcggaggcttgttgttactaccggccaggcgatgaggaggcctacggcgtaggggagtagttgggttgtcataccccctgcttgtagtgaagccagggcatcggtgtaattcatattgacgtgctggtttggggatggcaccacgacagggttttccacgaggttcaaataagaaagtggtggtgacgaggtccacggcactggcccatttacgttccccacaaggtttatgtactattttcttatcatcgtaccccgcgtatgtcagcacaacatatataactaactagagaagcatgtagtaaatatatgtatttactttctaatgtagagattgtaattgggcagtttcaaacgtggggccgaacacattcctgcgttatctaacaggtgcttaagccacagtatatatacatcgcacatgtatgtcacgggtcggaagcactttggcgacgatcagaagcttaaggtcaatataactttgctttgcatcatttaaacctttattgaagttcacatcaggtctttacagttcccatgttatggctatatactctctggtttatgttgggaggatatacaatgctctgcccccacactttctggcagatcattatgccaacacataaaaagagtgacacacactagcgaccaatcaatttgagctcgaaagcccgcaacggtgggaaaaacagcatagtgaagcccgcacccaaccagagacccagatcagctccgccagccatctgcgcaatggggccgatataatacgcctgagactaaactgacgtattagcaagacgcagttaactggattgggagtataaagtcttaccatgccgacaattgcaccagcccaaccgataaggaaagcaactcctgctgcaatccccaacggcaatttatcgcgacagttccactgagaccagtcatagcctctatttcgacggaaaatcatgtgttcctcgaagacaatcacaacgaacatcatgacccagtatccaatcagaggcaggaaagacttgaacacctcgtacagctggtcccggcctcccatcgcacatgcagcatagataaccgtagcgagagtcgtccagaccggtcggtgaacctttccaaatatcccgccaatcatctggaggttcattcccatcgagtacgccccgggagtgttattagcaaccaaggcgaggacattgataacagcacagaatttcccgaaccccccgagaccgtcgtatgctgtcatcagcacgcctccgggactgctgccgtacttggccgcaagatgtgccgagctggcgataacggttccgagtccgatgcccatgaggaaaacaatcgacatggcactagtggcggcgaagactgtggctaggaatatccgggagctcttcatctgcggcgggagatagacatagtaatcggcggcgagcggggcccaggcgagaggaatggacaaggccagggagaagaaggtaagtcttttggccattagttgctctgtcgacattggtgtctggatgttgaagtcgaaatttggccctgctgagcccaccatcacgcatatcaccagcagctgtggcaaccaggcaactctggtattaattagaatatgcattgaagatatcctgggctgccaacacttaccgctcatataattggaagattttcatcccaaacagagccataacccagctggaaacggcgatgatgataatgcccactatcacggaaagatgcccaccagagaccacggacaaaatctggccaccgacgacgctgtttaccatactgtacccgatattggtgaagaggtttaggataatgcaaactttgctggggtaataacccatgaaatatcgggccacgatctatcaagtgcatgagcatccgttcttataaagtaccttctttcccttgtgtcgtgaatcaccgatatttcaatacgtaccaaagtcctgtttccgctcttcggtccccatatacttataaagccaaccgtgaaattgccggctaaacatccaaatacagcacagagggccgcatccctgtagctgaggcctaagacgagcgtacccattgatccaacaatgatattatttgtagccaatgtcatgctaaaccacattaacagcatatgaagtatggttgaaggcgttattggctctcgtttgttgataggaacgggctcgattccgctgctctccacatttttcaagcttgcaatccatcgttgccatcttgattgcggcacgaggtcaggcttttcgacggagtcattagagaagctattcgaggcggttttgtcgaggtaagactggctcggacactcgagagtactcgagctgtcggctttttcgatatcttcgagcttcattatcggatatctcgatgtgtaagtggcttgtaaggattaagctgttcgtaaacaaaagccttcgattcaaatccaccactagacagataaatgccaaagagtctggcgtatagataggatgtcgtagatccacagctgtacaacggtcataaaataggagggaaatcggtagttcgtatgaaatatgacggaggggggagagctatggaatgatagatataaggggaaaaatatccagccagtgcaccatcgtaaggccgttaaacactgacatcaccctgtctacctagtgaaacggtgtaacgacccgagggggaattaaatacataagcattccttagcaatcaaggtaccaaccgagcagcttgcataagtgtccaatgatgagcactagatttgcattaccgcaatacagtcgggaaggaacacgcccagcagattgtagatcatctatcgccttgtagagagaaaagaactacccagctttatcccaaagtggaaggggcttcatcgtgctgtgcaatattgaccatccacaaggacacccaccaacacacatattcggtggattggtaaccatctcatgataccatcaagggaagggataggcgcatgacagccacacgatgaaataaaagtcccgccggcccctgtgatccgcgatacatttcctgtatggggtaagtggcatgctggaaagctccgaatatgcatgctctggaatgctgttgatgcaaggaatatctattagctcatgattctatacaatgctcagatttcaggaggcgggtccgaaatagaggaggaggatgatcagcccaaagctccgttgagcaagttccgcgagaaatgtagcttgtgattgatgcaggacgaatacttccccggggatctcgacgatttgctctagccctaggagaaaaaggtccgagggaaggggtacttttaaatagctctgattagttaatgtttactcctattaagtcactcataacttgacttcattactatatatagagagttcctgcggctattcggttgtcctcggtatctctcatagcccatatgagcacaagttgaagttgatacattctacagaggctaccatgaaggcgtgaatggtgttacacatcccgccatctctcacggtcttctgtattcacctcagaagacttgtacgaatgggatcccgaactatgtgatattacgtagcctgagtctttagctcaggtcatttcctacaagtccagctaagctttcctcctgtctcttctgacccacaagccggaatccgtgatacggatccgcgaaggcgaattctcctagcttgccaggcgttggcgtactgcgtgagagaaatgctgattcgtcaaaaagggcttgactttccgtaagattagattccactgctaacatggcgcgttacacccggtatacaagtgctataatatatctagtagctgtctgctagaggctttctaattcgagctgctaatatgaggacgcctagattccgggtttctaagcaattttaagagctaaggcttatagttagctacttttctggtttgaatactattatctagatattctggctttgttcgtacactaggaatgaatatatatcgtctgtcaataggaaactcgattattatatgtcgcttctttattgtggccaagagcgagattggtgtaagacgaaaatataccttgaggacataaagtattcgatttaaagatccaaaattttcaaaggaggcacaagaagggaaatgagagcagttgatctggtctttctgtcgggaaagaacagtcaagacactgagagccttgaatttacgctgtctctctgtttctcttctcgatctaccaatatgctccatcaaacgtgtctcatctcatttggttttcttcacttgatcttcctttcacctacacaatatccttgtccatactgaacttacaatggcctctgccgatccaccgtccatatttcaacccagaatacgcgatggcatcgttgtgtggattggttgttgagaggatcagctaggagcatgacttggttgtgagtctcaagagctagacgattattttaagggtacctagatttgtcatagtatcactggggcctttgatgaatggttttcttgtccattctgatcaagtagccagctgtttggattgttcgggttcggattcgggtgcggtataaaaacctgggagaatatgcgtgcaatttgtgcctcgggaatatcttccgtttatgaactagtgtattacagggtatacgactactgtggagagtggtcgatctttttctagtcctgatccactgaaaccctgcatcaccccgcgaaatcttggataaattaaagaggagaggcactcgagataggtaataggtcagatttttcagttccggagccttatatctgctacactgaatgatatcacaacagctcagtgagtatacgacagtaagtgtgtcgacaggtggactgacctatacacctcgggagtcaccgacccgatacccctggagtggagatatgcggagcagcaagcttctgatagaacaagttagaatagacctccttgcagaatccgagaaccattcgtattcgtggaaagttgagaccaacccagcttccccacaggtctgtggagagaagcggcatagcatttagcccaatgccaatccccgaggttgccccggttctaaggccgcttgtcgctgctatagataaaaagattccattccttctgtctggggttctattatatctcccttgacatagttgagagagtgcagacatcatgcggtattctctatgggcctctacgcttgtgctggcttcggctgccgccacaacaacttcactgagtgatatatgtacaagtgcatatgcgaagaaggcgttgccagtggatcaactccagggagttaccgttgatccctcttccatttccacgagtctcgtcaccaacttcactgccagcagtatattctaccctaccacgaccttcgattactgtaatgtgactttcgcctactcccatgacggcattgaaggggatattgttcatgtgcaatactggcttccagctccagcacagttcaaaaacagatatgtgtctacaggtggaggtggttggtatattaactcgggcactcaatcgatccctactggagttatcgttggcgggtacgtatttactcgtatcaatttggtggtatgaatgtctgactgacagattacataaagtgttggcggattgaccgatggaggatcaggaaacttcgatgccgcatttagttccgttgctctcttggaaaatggaactatcaattggcaagcgacgtacatgtttggtaataccttcatacttccgaaactcacagcttacgggtcagctaacataagaaacaggctaccaagcccagcacgagctcgctgtattgggcaaagcgctcacgcgaaatatttacaacgtaccgtccagcgagaagatttactcctactatcagggttgttccgagggaggccgtggcggatggagccaggtccaacggttccccgagcagttcgacggcgtagtcgccggtgccccagccttccgctgggcacagcagcaaaccaatcatttgacgggcaacgtcatcgagaaaactcttgactactacccgcccagctgtgagctcgagaagatcatgaacatgactgtcgcaagctgcgatcccctggacggcaagacggacggtattgtatcgcgctccgacttgtgtttgaagaatctaagctgggattccatcctgggcgcttcttactcgtgcgatgctgtcaccggctctgcctacgtgagcgccacacctgcgcagacaggcaatgtatctgccaaagccatcgaggtcgtcaaggccttttggaagggtcttcacgactccgacggcaagcgggtttacttcaactaccagcctggttcgactttcgacgatcttgtgagcgcatatgattctaccaccgacagctggaatctcgatataagcagtctcggcgggacgtgggttggcttatttatcgatattttgcaggagtccaacattcccagcttggatggcgtgacctacgataccctcaaggaatggatagtcctttcccaaaagaagtacggggatatactccagacaacatacccagacttatcggacttccaagccgccggtggaaaagtcatccacgtccacggagagcaagactactcgattccgaccgcttcttcagtccgttactggaactcggttagggaagttatgttccccaacaagtcatacaaggaaggtgccgccgctgtcgatgacttctaccgactgttcctcattcccggcgtgggacactgtgccaccaacgattaccaatccggtgcgccatggccacagacgactctgcagactcttattggatgggttgagaatggcacggcgccggcgacactcgctggatctggtgagattgaaataatatgtcgttggcctcttcgcccgctttggacttcaaatggcaagaagttccaatgtgtttatgaccaggaatcgattgatagctttagttatgatttggatgcgtacaagcttcctgtgtactaagaagtacctcgtcaagtgagggttgcttctatttgatgaaaacactgccagctctttcaatcaacagctggacttcaacctgttctattcaatcttttctgtgtatttttatttatccccatgccccaaaaaggtccctccttaacctcatatttgagtactccgtactagtgctagtgatatacatactccaccatggttggccaataattgaagacccgcatttcgcacaatgtggggttcgaacacccgacatgactggctgatactgcacgtgacttccgaatagcgtaggaccaattatatgtcatcataaagacccacacccgtataacctcaaaaaggacctgtaaaagaaaaaaaaataggtagcttctctttgattgagcgtgtcatccttagtgcaggggccatgctaatcttctctgtatattttcatttgaccatatgccccgaannnnnnnnnnnnnnnggtagcttctctttgattgagcgtgtcatccttagtgcaggggccatgctaatcttctctgtatattttcatatgaccatatgccccgaagggcgaagggacatccttatagttcaatataacctgcattctgggcataattataccgcctacgggtttggaattgggcaaacttgaggaaggcaggtttgtatgttaacaagtgaggaaggagtgacaatacgttcaggaaagcctaataaaagtgagactaaactacaaactagtaagagaatatgaagatcaatatactaagaaagaaatagagggaaaaaacatggtatcttcagatctttgagcattttacaatcaagtatagtaaacgaaaaagaaaaggaaaatgctagatggcaccggagcctttgcatgcgccgagatatccaaaacgagaaaggccagcctggccgccaaacccaaatgcaaatgattgtatgaagcccaaaagtacaaaagtagtctatgcttaattttcaacagcgttacgccgaatcacccatttccagacaccgaaaatagagcagcagagttgagacgagggaatataggggcataatgaattaaacatgtccccgtcgatcggggaggagagaaaggagtagaatataagaaaggcgagatggagatgaactcagacgtgcgactgactgagactcgatctcgatctcgagcgctgagacaaggaccgacggccacggctggagggcgcgcggtccggcggagcatgctcgaagaacggaatcagatctgggttctgactcgggggtgtcttggagtcaggggagtactcgttcaggatacgatcatcagcagcggtgtctgggtggatctcaatgcctggctcgcgatcaaggccgctgtgagggcccccgttggttgggaaagtgacttgttcgggctcatcgtggcctcgctcgatcggagaccatccggcaatactgccggcaacgatacctgccatggcagcggcgggtccgaatgtcgagttcgagcgcgaccgtgtgttgcgtctggaacgagactctggggtggtcggctgtgggctgccgttgtcgttttcgtggtcattgtcgccattcggtgtgggtggcgtggaggaatcacgcgagcgggagccactgcgggaccgaggaaggaattcctgagggtgctgtagcttgtggcggaggtgtcgcagacggccaccgcggacgcgcttgaggaaggcgagctggtcgcggatctcttccagagcggggttccactcgtaattgcgatcctcgtctgagatgaccaatgcgggacccttgttgcgattccagaagtgaggaataagtctcgagatgaattcatccggaataagacgaatgatcacagcgatgggtatggagattgctccgagcacaagactcacggcccactgcgagccttcgttaagacgcttgacggagaaagcagcgccaccaaagaagatgatcaagatttgacccccaataatgatgatctgaataccaatgaaccaacggtttctcaaaataccttccaaaatgttgagcttgttgtcaatacgacgggagttgtactggttgaaaatctgcataaacacgaaagtgttgaagaccacggtctgcaaatggccgctatcccaagagaaaatcttatctccggcgaaattcagaacgaaagttacaaccagctggtagatggactgtccaatgatcatcttccacattgtcagagtgatgagtggatcggatttcgactcgggtctgcggtcaagcactgtttctgtaggagggtctgtcgccaaagcgagagcggcaaacgtgtccatgatcagattgacccacagcaactgcactgcgctgagcacggagtcctcattatcactagcgactgcagagacgaaggtcagaatgacggcggtgatgttgacagtgatttggaactgaaggaacttcttcacggcgtcacagacagtgcgaccccatgccatagccttgacaatcgatgagaagttgtcatccatgagaataatgtcggaggcctctttggcaacttcggtaccagtgatacccattgcaaaaccaacatcggcattcttgagggcaggggcgtcgttagtaccatctccagtgacagcaacagtctctccaagcttcttgagttgattgaccagaatcttcttatcttccgggctagagcgggcgatgacctggagtcttgggatgatttggttcatttgacgtgtgctcagcttgcggaatttgggtccctcaatggcgataccgccaggtgtgtagataccacactcctgggcaatagccttggcggtcataatgttatcaccagtcaccattctgacaaacactccagcacgttggcaagtatacactgcctcggcaacaccggctcggacaggatcctgaataccgaagattcccaacattgccatgtccttgaagataggttcgaagactgcctgggtatcatcggtttccgaagtaggggctccacgaggtggccattgatcgaagtcacggtaaaccagcgcaatgcatctgagagaacgagtggcgtaggtggtcataatgctgtccagtgcagtcctgttctcatcggtgacaggagtctccgacagagtgtcagtggggtcttggacgatacgagtcgacttgtgggatagaatttccgcggcacccttaactagcattcggtattttccattctccagctgcgtcacgactgccatgcatttgcggccagaatcgaacgggaacatctggacgaccttgccatttgctctcgcttcgccaaggggccccaatccaaggtaatccctagcgaaagtcaagagagcagtctctgtcttggatccgacgtacgtcttgactccatctgtctcaccttcaaatgcggttgagttgtagacaatggacttgaggaggacatccttcaccgacggtgatagggaagagacaaaatccgagggagtgatttcactctgatcatcgctcgagacaccagaatacttgccgaaccgagacgtggtacccaacgtcgcagccactgcagtcattttattctccgtcaaggttccagttttgtccgagcaaatcgtggtagcgttacccatagtctcgcaggctttgaggtagcgaaccaagttgttgtctttgagcattcgggttgtagcaaaggcgagagcgagcgtgacggccagtggtaggccttcgggtaccgcgacgacgacaattgtgacagcaacaatgaaaatctgcaggaatgcttgacccttggcgtccggaccacccgcgatgtccttaagacgaaccaaaaatttgatgaagagaaccacaaacagcaacaaaccagaagcgaggccgagcttggcaatgtactcggccaacttgttgagcttcgtctgcaaaggcgttgtttcgccctcctcttggagggacatcatcgtccggccgagggttgcgtgtgtaccggtagcagtgaccacgaacgtgccgacgccctcggagaccttggcaccagaaatgatgaaaggatccatcttcttcaggtcttcgttttgttccattgttttatacacttcatcgccgggggttttgcggagaacgtcagactcgccagtggccgaagattcgtcgcatttgaggtcgtaaccatcgatcaagatcccatcaactgggaccatatcaccgggttccaaaaacatcacatcgccaaccaagacgtcgtggacagaaatttcctcggttcggccggatcgttttaccttgacctgtcgattctctttctttttgttgagttttgcgaactgttgttccttttgccagtcattggctgcaccgaccaccaccacgataataatggccacgagaatggccaaaccttcgacccactcgacgccaggttcgtcgggatttgctgggtggagcgattgcggaattcccacagcaagtgaaactatagccgcaatggtcaataagatcaacaccttgtcgttgtaggcaatccatgccagctcccagatcgtcttcaatttcctctctggaagcctattatcgccgtagatacgtctgcgatcgacgaaattctctccgttgtgctgcgttatgacggaaccctcggtcgtgggtggcggtggtttagtcggagaggcagacttgggcatgttggttcccgaggcaggtgtggtgggtgtgaccacctcgtcaaagctgacagttccgtccaggtttgtctcatccacactcaagccactttttatatcagtccggagccctttttccagtcctcgcaggcctcccaacgcatggaaggcgccaaagctcttcggattgagaagcttgttcagctgaccaggggaaaaggcaaacttgttatcctcgacctcaaactcgtcttcgcggccggggtctggggacaggggatcctcatcgtgaacgccgtttgtggcgggacttttaggcgaatcggatgcggattcctgagatgatgagggcacatatgtgtcgccgccgtaggtgctcgatgtttggttggtctcctccgactccaacgagttgcctctcgagcgtgttccagggacggaaaggaagttggaatgtgtctcggccgccttcgtcttgggcgatgagatgttgtgaggtgaggttggccggctctctcggtcccgagcttcggaggatgcattggagcgaattgatgctgtggaatgcatatccgtagaagaggcactgccattgcgactgccattgcttagcagtgcggttgtatcgggggcatgtgcgttatcagtgtacatccgtgatcctcccgagcggatttgtaaaggcgtgtattcgttatccggggggttcacggccgaggtgtcgatagtaatagtcggcgcgcgctccctgcgcagggttgacgattggccgggctcatcttttgagcgtgggtcggacattatgggagtgtctattcaaggcgcgattcacgcgttggcacccgggtttgtatatggggtcatatggatcaggaggaataagtgtccagagaatgataataactccctaaactcctaaactcctaaactgtccagggttgaagatgaggtaagggtgggaaaagtgtgaaagtgtaaaaacaagcttggaagataggaggcaagcccaggtaataatcgcccccggacagacgtcaagtcaaacctctatccactccggtcgagaacttcctaatgcaattgatttactttcgttactccgtacggagtattggctttcttcttttttcttaacttctccactttgggggggagacccgctagcacagcccctactgtgattctgcagatgcgatgtagatatgtgatgtaccctacttgatatatgacctggacgtgctattgttcattgataagaaggcaggggaattctccatgacagtgagaatatttccaggacatttccatgggtaatcggattatgaaggagcaaataccgcagcgatgcaccaataccaagctatatagcgtctgcactgcctcatttgccaagacatgaaaacatgcccgaaatcccgattcggcaaattaggggggacggcgaaaataaaagaaaagaattcaaggcacgaacttggagaatctgcataactggagatcgagtgggaattaaaggaacagcatcgtacattaaagcccaaacatccctttatgtccgagctagttgtcttttaatatgcccttgccaaagtggtgacgtctcctatttatatgatcgacgtggactccgtaccggcacggagtccgactgtagcaggtccaagacttgttttcttttgttttgattgctgtacaatataaaatcaaactctgattcccggaacttgacggaccagatctccctaactggtttggccaagtacggacataacccgctattacagctcacaccacatacgccacactcagaccattgatccttgcatcgtacggcatatcaattgactactctgtatggagtctctgtatggagtctctgtatggagtatgaactatgaagtatggagtacgatgtactagattagctcgaggtacaaagcttagaactgtcacatggacataaagtaggtgtagctctgtaaatccgaatccggcatatagctacggagtacattatacaatatatacttcaataatttcccgtctccgagtaacacatagaacacatagttcagcaaaagataacaccgaatcagaaacccctaaaacaagccaaaccaacaattccaatcccaattccaatgccaacattcgccacctctcaaaccacaaaacccaatcaaacccagaagcctcaaaagttgggaaacatcccaaccaacaaatacggcctcaccgccgtcttgcccttacaacatgtacccagcaccaacctccccccacccgaccccatttaatatttccagtctccgcaaccccaatcgcagaaaccccactagcacaacgcatcaacgcccatacccatgcacgcacgcaccacccgaacagacataccactcacgagcatcccaattcaggctcgcaatcaaacgccaccggttcccgtttgaatcctgggtacttcgacgataagacattcctcctcgctggcttgttgcatgatattcggaccgccgaggctaatatcaccaggctgggctttgagtacctccgcggcgtgttggcattgcgtgtcttgcagaatggtacagagtccatcatagctccggtgcggtgatggccccgtgttaatgaatgggtgagtaaagcggacgctgtcattcgatactaggatttgtctctggtttgtaatatcatggctgtgggacggttgctgcagctagtacggagtaccgatctcggtatataaattcttgatgtttataggttgatgtttataactatctgtgagtatgtcaattctcatatctatgttaggtttcgaagcattgacctcactttatcttgaactttgacttgactttgaatctctgaatgttgtacgagatgtttctcaaacctaatttcctctgatatattgttgacaaacgatgttgatgcattcgtagatgtcctatcgacatgtagttgtagaaaaatgaagtaacctgtcccccttccatgttcgatccagtttccttcgtatcaagcctcgccgttaaaagactaaaaccactcaaatcccatgctaatgtacacagaacaaatcgccgctagatctactgctcccggtttacggacgacacgatcccaagtctcttcttttcttcttcggagatcgtcacatcccagatcttcaattcctggcccttttcgaaggtgttgtggtccattggggacttgcgctggctggagtcccggataaccaaggccttgctcgataaagcgagcgcgtccacaagctcggccatgcgtcgggactttgtaaaggcacgagtgatgtgctcgtagtttgcaacccagatagacacaatcatgcaggatgtcaataggtcgtgccgctcgagggcgtgactggcgtagtacaacgcgttatgccaatcgagaatcagctctggaatgtaggtcgtccgaatgtgttcgaagtctttttcttcctcggctatagaaccaattagtcttgagattccaatgccgtaacatcaagtacataccatcggtagatatgggtagccagtcttcggcgaccactgctccaacccattcctctagaatactgacgcattcgttcatgtcttgacccatgttctgcaaggtacccgagtcacgtcgacgtttggtcctaaattgattagctttggcaatgagatgaatagggaagggaaaactcacttggacatctgctcgtgcaccagtgcgaattgctccacggcatcaaacccaagagccagactctccagatctagaactctatgagccctgtagtatgccgaaactagtgcaacgttgttggagccggaaagacttgcggaaagacttcgccggtggagactgtttctctttgatttagtggggctagttggtgtagttgcctcggtctgtagcccttcttgtggaggcatggaaatgatgtcggatccgaatttgtcaatcgagatatcagccaaccgaatacggaaactcaactcgcgagcagcggcaagcttatcagcaactagtaaagtcagttcggttggattcaaacactaggaggaacaacaacatacggaagaacttgcgatacagccaggatccaagatcgcaaatcttatcccactgtccatctatgtagcgaagccactccagactgcgaatcatcctgtcatcttccggagcgacagagttcccaatcaagtcggtcttgggtgacactaatgtccgggaaccgtcaggtcgtcgcagcaccctcgaatagccagtgactcctctagaatgttcaatcgcagggacatgttctttcacccacgcccattgaacatcaagaacagtttccatgttaatatgatgtttccgtgcgagtcgaacttgttgtatcttctcttgtgggtcaacgatttcaataagaatcttagctagaatttcgtgtcccatctgtgcggggaggagagagacgtaaagtgggacaaggtggaatagacccctgtcttccaggttggcgatatgcccagccacgatcactgacgccgtttcaacgaaatgggaatccacgcgggcgtatcccctttcactagccacaacgtagacatgagctgcaatcctgagagcttcttcgtcatcggcagctatgaggaaagattcatctactggcttgcgcacaatctctggaatcacagaggtattcccgtatttatcggcgctgacttgagatacagcctgagcaagagcagtgaagaatgtatcgtagcctttgctaagaatcgtggcctggatgttgcggaacggattacgcgcttcgccgctaacccggtcgttgcccttgagatatacaaggaacttttgaagttctgcgtgcccagctggttccggcttgaatgccacaggggtattgggggagtggctgagtttccgctggaattgtttgcagaatccctggtagcgtgagagcacgacacggttgaagtacacgtaaaggaagtcgtcccagctccggcagacgctggctgcagcatcggtttcgccacaaagcagggcgtaaactgctcgttgaaattcatcggtattggggtcgcgtgttagcgcagagcaagcggtgcgccatgcatcttgggctcgactgttcatcaaacgcgtgtggccatcgtcagatgggtatcgagtacttgccgacttgggatccacactagagccgcacatgctgacggccctccatccttccagacgactctctgcccattcgcgaatcttagtccagttttcgccctgtctgagcatcttccagcatgttatccaggtggcgcgctcgaagaattcgtcctccttctctaaaccgtgcttctgacgagtgagagcatcgggatcgagctgagtgactagcggtttttgatcgcctttgctcagaagcgagcgcgagatgcccgggtcattgggttcgaggggctgtggccaggcgcgcagacgtttgtgacccttgatcgattctttggtataaagccaaccggttgtccacaacccttggccccttcgcgattgttcttccatttctgtgatcagggtgtcaaactgctggctttcggtcttagatgtctcttccaaccatcgcattgcaaccacgcactcaaggccatattggtcagcattaaggaactcttcccacatctcgcgatcggttgagtagcggtgaaggttctggaaagctgtctgtcgtcctgccttgtaactagcccggctagaggggtcgtcaatgctgatcaggttgagcaggaggcgccaagtgtcggcctcaagttgcaaccgccgtatctcctcgtagcttttgtgctcttgcgacccgcttgatcggaagcctgtctttgtccggtccacgatttgttgtgtctggatttccttgatcgcattgttcgcaatgtcgcgatagctctgtacaagcttgtaagctgcctgggcactgttgaaatcgtcggttgaattggcgcgcttgaactgatccagcttatcggcgaatgcttcgatctggcgagtgacgcggtccgctgtccggcgaagggggtgcagcgcctcctgggcgcctgccgcggtgaacagcggggtgtctgggacagagtttagtaaatgcgatctagacatagatcttgagctaaccttgagatttgcccgacacgccaaagacagacggctcatcagaaacatcggacccggtgtccgatacggtgtcgccctctgtatctccgtccatgtcctcatcttggtcttccgattggtcttccgactgatcttccgattgatcttctgattcttgttcctcatcctccaattcttcatcgtcatcgaaagattgttgcgaatcatcgtcaatagtgatgacctcagtttggcgctgggcaacctacacaaaggattagtacataaacaaatagccaagatcaaggataacgaactcaccggtgtgaatgacccggcggccgatcgagttaaaggcgccatgatgggagacttggttagaagggaggagagaggagctctgtggaataagttgtgtttgtctcttttggttttcgtgactgactaacccgaacgggactagcggcaacccccgaagctatttcaacgaattttcgcccgcgcacttctcttcttcttttcttttcttctctaatgtctataggctttcattagagtctcggtatgaaaactcaattttcgtacaggtccatgaggcctctttgcgtgctcacgattgtcttataataaatgcagttcttcaattagcctggtttcctccatatggaaactcagaccgcaaaggaattgtgacatcctccatcttcaacatgggtcacttgaaattgaaatttaaagaagcaaacgtaatagccttactactttacttccctgctgcctgagctcgttgcttcatcttcaacttcagcaagtttgctttcgggcagctgacggtagacgcttggtcaccttgctgttggtagaaggcattgcagcactcatataaagcatcaatttgtgcctggcatctgtcctcattgaaggagtttttctgcaagcagtctagcttggttagacctttgtgtcaacatgccatgaattggaaaaataccttgaatggcgcactgttagagagtcagtaagagctagtaacaccatccaggcactctaaatggacgctttcagatatgggcacatacagcacgcggatggcagggttgatcgtgcgacagatcttgctttaaattaccctaaaagaatctcagcatctagccaatatgtccacagtgatacttttcataccataatgcaagtatcaaagactgtactccgtacaaagcgttgtagatactgttccttggaagtgacgaaagtgatagaagagccaaacgcaaaatagattctccgccttcagaccgtggggcgagtgtgctattctgccgtcgccgctgatctctcttcttcctctcttttctaaccaccctttccacaaccttcactatcgcgcttctgggctttcgtcgtctaggtgagtaccccgtacttcagttgtgccctaaaattgcgttgaaatcgcatctaaccctcctttttgaactcttcagacataattcaaagccccgctcaaagaggtttctaaactcgctctcgctcctatcattgtaagcattcttcctcattgacattctggcttcataagaagtagccgttgaacgaaatccagactccgacagttattcatcatgtccgacaaagaaggcgctgctcctcccaccgagcacctgaacatcaaggtgaccgataacaacaacgaggtgttctttaagattaagcgcacaacgcagctgaaaaagctcatggacgccttctgcgagcgccagggcaagcaaatgtccactgttcggttccttttcgacggcaccagggttcgccccgaagattctcccgacactgtacggccattcccttctttcgtcatttattagtatctcgaaatcttgaaactaacttcaaatagctcgatatggcagatggtgataccttggaggtgcaccaagagcaaatcggaggaggttgctagacaacaagccttgtatgctagattcgcacttcccgacggaaccgaggctactggagcgacatacgttgggggatacgctagggctgctggctagcggtggacagaggatcctcattgacggcccatgggcgaagcggcggcgttcatactgctttttttcttatgaatgatgattatcaaaagcccttcagtcttctctgcagactttgagggtgctttcgctatgttatgttttcctcgaggtcgaccgaccgcatcgcgtagacataggtagtctcattttggtccgaggctttgtatttgaacctggaagcgagaaaccaggacttgtgccaaattatgaagactttcttctggggggggcctgtttcatccgttagtttaggtggtttatggggtctcaatttagactgcgcatacacttactaggccctgctatcaccagtgatcgccttataacgcggttaccaggcaatcgaatctagggcccaagaaccgcggagttgtccccccatgatcagttgatcgaccacatgtgttcttcgtgggatagaaagtgcaagataaccacacacaaagcaataaagagacgcccattcatcgcccatggtaatctgtcacacagagagaagacataaacaatccaattcaacaaatatacacatgcatagagagcaaatcgcctaatataaccccagaaatgcaccctaaagcgatctaactgctccaaatagaagccttcatcttctcctcctcctccttagccttagccttctcttcacgctctcgattccgcctccggatttcctgctccttaatcgagcggtcataagcgcgctgctgctctgtccgcttcggggcgcggatccccaacgcaccggcaatcaaccgctccgcaacggcagtctgcttctccggtcgacgggtcggggggcccttcgccgaagcaggagaagcagctctcgccgtccacgggttggaggtctgcggggagataggtgtcggcgggggacccagcggtccctcagcgctgatgcttggagagagcagctgggaagcgtattcgtcgcgggattcggcttcctcgctttccgaggcagagaggtctgcttcgtcttcccaggagtctgcgacgggtttgcggtgtattttagggttggacttgggctttgaggtcacggctgctgctggaagttttttcacgtttggtcgggagatgtctcgcaccgggcccttttcgcctatggacaggttgcggagtgtggattcgagttcggcgctggcgctggcgcttggatcagacattggcacgtgaggttcgggtgtaacgggcgataaatatacaaagagtgtagtggtaatggtcaacgagagtatttaatacacagtccaatttaaggaagatttgtgcaggctcgaaatagaacgaatggcgtcagtgccggtggcatccctggtcgatcgtggagaacaaagaagggctagacctttcgggttcggctgcctcaggatagtcaggcatcaatagagtcttttttctatttatatttcagggatagtagatcagttatattggattcgtaatgtctttggtggatttatcaagtacataatgctaacattcagcccctgacgttggaaacatccgaagctagcaaaagaaaccgacttatagatcatctaggagcatcaaactattgcaacctgcatcagaagaagttatagggtagtaggagtaataaagtgcacaataaacattgaagaagtgactagcatcattctagatacttcgatattctatctgccaatagatcctttctactcccatgtaccaaccatcttcgttctttcccaaaactgcacccgagcaaagtcactaaagtgaggccgttactcaagaaacgggtctggtgaaaagaagctggggttttccaagatcatatcaacgataccatcgggtcgtggccgagtactccccggtataacataacaaagaagtttgggacgtacggctgtaatgctaaaacgaggatctgagcacacccaatggactaggctataaaagaagaaagaaaatcacgataagctcggttgaaggtctctgcagtgtagtgttcaggtatacctcaactggcatctggcgggttgtgaataggaagtttaatagagtaatgagaatataacaacctactgacttcgagtgttttggaatttgactcgtaaattcaatgaaggtcaccgaccatggcttccatgcaaagccgatctgtggccgaaaaatttcggcaacagcggtctctcaaagaaaaatatatccaagaatgatgcatgtaaatctatgtctatatatatctttctttgacacacagtaacatcgagagagtaaagaaggtagtttttcttcgtgacatctatacggagtatctccgatcatatcaattgtcctctatgctagaatcatggttgaaatccgcgctgcagccaaatgtacggaggtgactcctcaatgtccagtcgagggcaccatctacggctacgcacctgatcttgtattcagcgttgagttctgtttgatattcggtgcttgttctctgatacaactcggccagatgatcagatggcggctttggtcttttagtattgccgtgattctcggttcttcgactgaagtgattggtaagtcaaattgaaactctatgagaatcactggagactgcccgggagaatactgataaaagaaacaggctattttggtcgtatattgttgaaccggaacccatattcatccgccggctttaagacgcagatttgcactttgacactggcacccgctttctggtcggcagctatatacctcacgctgaagcatgcagtgaacattctggggcaacaaaactccgcactgagggcgaagtggtatccctacctctttgtcacctgcgataccgtttcgttgattctccaaggcgctggtggtgggcttgcggcagcagctaaaacaaccaaagctagtgatatgggcagcaatgtcatgctggccgggattgtttggcaagtggtcaccttgacgatatttggggtgatgtcgggccactttcttctccgtataaagaacgccccaaaagatggattgacggttgaggcccgaaaagtctggaacagtcgcaatttctgggtattcttttggggtatctttgtggcattcataacaacttatgtccgttgtgtgtatcggtaagtcactggtgataatatcttgatatctgctgagtactgatattggagtgtctagcatcgcggaaatggctggtgggtggaaaaatcacataatgcagaacgaacttgattttactatccttgaatcgatgtaagtcgaactttgacaacacaaattggaagcatttgaaagctgatggatcctagaatgtgttcagtctctgtgatagccctatgtatcacccctcctgggtatttcttcccgcaaatgcgtggagattacactagattagtgaaagaagtggatgtgaaggaaatgaaggatgtgaaagatgtgaaggtctctatttcactgtggccagagccaccacgctatcaggaatttatttgattctggtgaagttacattatcttttggctagatggttgtatattaatgagtgagttgttttcaggatgatttcagatctagacatagaggtttagtggatgttgtttctcaagaggaatgagggaatatatatttataaatcgttgcattagattgaaaaagagatctatgctgatatattttatctagtatgaccatatacactttgaaaggcaaagcaactattgctccttagccaacgcgataaccttctttgcagcctcctcgaatccatcaaatgcatgcaaaggaaggccactctccgcaatctacggatattcaagttagcaactagacaatggcagcggatattcggatcatgcttaccatcttctgccccagttcctcattcgtacctcgcagtcgtacaaccactggaaccttcatattcaaatcccggaaagccaagataatgccctcagcaatcatgtcgcagcgagtcagtccgccaaagatattgacaaagacggctttgacgcgcgtgtcagagcaaattacgcggaatgacgccttgactgtctccgaagtagctttgccaccggtatcgaggaaattcgcgcagtggccgccgtggatagtgagagcgtcgaccgtgttcatggcaaggccggctccattgactgcgcgatattgtgagcgaatacccttttccgactaaggaatagactagaatacataccgagtgtgccaatattgccttcgccttccaatctgctgtatgtcagcaaagatacagacaaactagggagtcatggatgtgctactacatacttgacgtaaacaattccgtccttttcggcttcaacctccgccgcgacctcttcggatatatcccgcagtttatggatatcttcctgtcggcccgagctacggaatgcagcatcgtcgaagccaaaacgtgcaccctggacctccaaaacatcatcgggcgagatgccaatttgcgtctccagcgtgaaggcctctttttccttgtaaatttcccaaagggcttgcagaatgccttcaagctgcttgtgagcagaggctgggagacccaactgctcggcaacatcagcgatgacggagctttcgaacttgctctgagtgtaagggaatgggaatctttgcgactgagccgggctaaatccggaagtcgccgaggcaataatgcatggcgataaagctgttcggtcgactgcaatggaaacagaaacaggactatcagagttagaagccgactcgttgacagggacggatttctgcttgaggatgtcgaatgcctggaactgcttgatgtacagagtacgcttgtgttcagtgttccgtctcgaaattggcgtaactcgtctcatagtatgaaagccacgtttttgtgagccagttccagacattggctatgagtagttagtatagctcagattgggttctcaaagaaacaaactcacacggctagactggttcgcaaacaaagtcttcattccttcgccgaacttctcaggatggttaaccatgaccgcgccagcacgttcaagtgcccgatacttagtttctgcatctggttccccaggcgcagcccaagcaccggcatgtcccataacccgcccaggaggtgcttccaacccaccaacaagggccataataggcctacccaatatcagcattgcattcaaaccccgtcaacaagacacaacaacttacttaggatccacagtcctccgtcgataatccttaatccactccgcagcatccatctccgccgtccccccaatctccccaaccaaaataataccccgagtatcaggatcatcctcaaagagattaagggcatcgacaaagttcgtgcccgccagcacgtcaccgcccatgctaatacaaagactctgaccaagtccagcccgcgtcgtcgacgcaacagtctcatagctcaatgtcccagacttagccacgataccgacattgcccggcgcgaagcaaggcaatggctggaagccgattcggcatttgccgatggcggatataatgcctggacagtttgcgccgacaagacgggttttggattgcgtttgtagcatggagtggatctgtatgtaacacaatcaatgaaaagaactcttcgattactagcacggttcactgtgagtaggtcatacccgaaggatgtcgtggatcggcacatgctccgctacagccacgacaagtgggatttctgcttcgatggcttcttcgatagctttggcggtttggtttcccggtacatagatcgcagatgcgtcgggttttgcctgttcttgggcctggtgtgcttgctcgttagtcaaattacatccttcccaggagaacgtatcagttcaatcctcgtaccgctttgacagatgggaagacaggtaaacctagatgttcgccttcgacgccaggcttgacgcctcccacgatcttagtgccccattcaagagactccttggcattggcagtcgcctgtcttcctgtgcggagattagcattccatggacattcattgcgggactcggctcaattataacaaacggggataattacctgtaaatccctggtataataccttggtatgggtgccaatcttgaggttcggtaaagtgtccgcataactggccgtgcggggggtggttgtaaagcgccttattagggatgtccgcaactggggcgcccgtttatgtacggcgtgcagaggcatagcgttcatggaatacacatgcagattggcgcaatgcttctatagtcggaggaagattatatacaatgtcaacttcgaaatcaatcaagtcaagaaaggctactgagccaagtcggctataatccggtgtcggagctttccccacatttgccgaggaagttggccctttcaagcttttttatacttcgcgtcttcgcacatgagatggatatggggtaaatataaattcatacgtcgttttcgtctgattgaactacctagatacgactcctttctccaatcctgcacaatcaataatcattaagatgaagcttcttccccacaaatctccgcctaacagatttctccccgcgttgttcccgctccgcactgagacccttgagcgcatggagaagcataccagcatcgaagaaaccatctagtaagatataagttagcaaagagtcgcaatataagaaccagcaaccaatggtgcaaaagaggtaaaaacttacatcctcccataccatcatcctccatatagctactctcagcggcagaagtaggagtctcaacacccccacctcttacaagtcgaccgcgacgattcgtctccgcctgcaagatctctgcaaacgcctcggtctctctcgcccgactagtacgcggactcgtcgccttgcgattggtcgcgcgcagcaacttccgaatctcaaacagatacgtctcgagcgtgtgcatgagacgcgacgtttgtctgtgcttagagctcgcgcagatcgagatcgaatcgtccttgataatatagccaataccgaagccgtcggcggacgtagggccgaagccgaagtggcgcagacaagggtttccgcagttcgaggtcgacagtatagtggtattgatcttgtcccacccggcatcggcgaagattgcgggtgttggcgtcgttactgtgcggtagccgcgtgtactgcttccctgtgaggagaaaccgtcgtctgaaggggaggaggaggagagcttcggtgattcaggacactggctttgggtttgggattgtgtttcgccagggctggagtacccgccagttgagctggtgtccgggaagagaccctcgtcgaaggagcgctgccagaggcagtagagggcgtagaggtgacggtccgggccctggccctttgaacagtccttggtggcggcgctgtgtttttggcatgcgatgcggagggcatcgaccttttgttcggcggcattctcgccccagaatgcggtgacaaagtctatgcattctggacttacggtgcggatggcttctgtgcgtccgtgcaggaacatctttgtcatggctggttcgtaggtgttctcagctcggccgtagagaccgtagtaggcggcttggaaggccatctggatgaatgcatccggagagaagcccatcgaggtgatgaagttcttgccaaagcattcaaagtccaggacttggatttcgtgctggcagagcaggtcggatagatgtgattcggcgaagcggagcgcaatgttaagctcgggtgtcatgtcccattctaatttgcgcggtgtcgtgctgacatttccgaaactgtgtgggtcgcgcttcgcagggtcgggactgctggttgcccataggcttggggattgcccgttgatggtctttgcgaagcggaggatggtgtcggtgtacacgtcgctggcaaagcgtagcaccgtgtggccatccacaccggtatgctcgaaattgataccggcactgccgttcttgcagacgatgatttgcagcttgtcataccaacggttggtacaggttccaacctgcacacccttgacgacttcgcatgtgccacaaagcatgttagtacaaagatcggccatggaggctggctccgtggcgtctagacatagaatgaagagcgcggtatcgacaatgttcaaacactccgcgttgttagatctgcgatctttggtcatgatatcacgtaggcccgaccaaactttccggttctcggtgctgagtacacccacagcacccttggcagcctcgtgaagaggagtctgagtcgcatcctcaacgattacctccaggttaagcgagatatctttctcactcatgatcaaatcgctattgtcgtccaagacgtcaaaccagtagaactggccccgagccataacaactatgtgtttagccgtggggtcctggctaattacgcagccattttcggtaggcagacgtgcggttccaaaaagccgggagtactgatacatgcaaaggggcgttccccgcacggtatcaggaggcaactcctctcgacgcacagcccgaacaaacgccaatgatgagacggccagtgatgcagctcgagtcacctggtgatttctggcgggagttgggtcgtcctccaaaaggaagaatggattgaggtttaaaacaacagctgcgaatgttagatgactgcaaaaaattcttcacaggaaatccaacttacgattatcgaaattcaaataagaatcataccctagaaaatgatcagccaacatctcatccaatacttattctgaagacttacagaattgctcaatatagctcgtctttgaactagcataagccttcagccgctcttgcagaatagggccctcattctttaaaaagtcccgaacagcagccttggtatcttcatgatcacgcggggtttgcaagccctgcagagtctctaggtacctgcgacaggtattctccagatcaggaataggaagtttgggcagcgagtcctggtttgcaaaagtcaagccctggctcttgggctcagcaatctccgcggagggttgttcagaagagatatttgctctcatgactgtctggccctgggagtcaggcccggacttcttgcttttgccggtgtccatagaatcactggatggtttggggtcggcgtccgtaggatcaccaagtggtttgggatcggtgtccaaagaatcaccaagcggtttgggggctgtgaagaatcggactgccattgaggagtaagacataatgttagatgtgttcagattctcggaagataaaatcaggcgtagcgactagcgaggaaagtgggaattgacaggaggcgtaaggctgtgcggtagaagtagtggcagtcttggaggcagtaagatggcattggaactatgtcatgcgcagaacagatgcgggcaagggacaagaggacaaggagaagatcacgtagagggggagagattcaagtggcgagggagagggagagagtctggtaattttatataggcgtgcgggattatagaatcatctcgacgggctgtggatccacctcgggcctaaggggaaaaggaaaagaaacaccgactgagccatgtacttacagagcaatgtacgatagtgcaaatggtctgaaaccgaaatgcgggtttgtgtgaccgggtaatacggagggagagcggaatgatagcgccggagaaacggatgagttttctgctacgccgccagatgttaaattattgccaagaaaaggaccactgtggacaagtaggttatgggtgctacagagtccctttatatgggagactctgagagtttgtcccatgtagacatcgcatcttgaggcgtttccatggaggacggcgggtgagataggtttgtcttggggaggatacccctcaccccgtgggggaattcaaggggaaatgataggtgggatgcgggatagaccaggctaagaacttacttcccaaggttaatgtcaatcacgaaccctgcacgtcggcgcaggtgtctcggctcgggattaaagatgtacaaagcgtgccgttgagggtgagaggtttaaggtgaatagtgcttcaataaagataaaatgaattatcggcaagaagaagttcacttataccgccacagttcctcggacttttgaagtataccgaaagcgctcttttcttcatgtaccaatgacgtttcgggcgaagggaccggtcatgcgggggagtgggggtcacgtggacactacgtcatggggctaaaaagatcatcccagcgcatccaaaaggacatacaagagaacatacaacatacaagagaacatacaacatacaagagaaaattgggaaatcttacaatttcgtggatgggcatgttggaataacttcatgatacgctggggttgtacacagtacatcacgctcgaaaaataaaaagatgacgccagagattttgttatccacaggatgagccgcgacacaggagtggcggaagacaaggagtccaaaaatattcacaatggaacaataatatctgcattgccatgggtcctccaaaatagaaggacgaagcacgcttgcatacatacagtatgggtcaccgatcgaggcaggacatgcaaatgacgaagaaggtaaagacaagaagataaatacacaacacaaatcgaataggagacatattgttccgaagaacaggatggatttagatcaccacataagaatatcagatgtggcattctcaaatcaacacctccatatattccgagacgtttatgaagtgggcttcaagacgttgtcggcatactcgccggcgtagttaccaggggagccatagttgcagacagtgtaaggcgcggcgctgccaacattgcccaagtcagagcagctgacggtggcgcaaccaacttgagtggtagctttccagacgatctgagtgaagtggccccacttctcgaagttggtcatatcagggttggcctcaccgtagaggttggcgaagtatggcgcctcatcggtgtacatcattccgctgataatcttctcaccgacctctgccgcgtcgtaaccgtaggcgatgttctggccgtagtctccgctggcggacacgatggaactagtcacgttaggattattgtttctcaagcaaaacagaggaatacttacgtgtcgtgtccgtacacgcaacgagaggcgagggtgttggcagctccggcgaggtcatcggaccaggtcagatcgcctacagagtgcgcgctacggtggatgttgtggtagtacagaatggactcctggtaggagtcggtagagctggaggtggcagcagcggcggtggtcgaggttgccgaagaggtcgcgacggaggtggtagcagcggcggtggtggtcggggcgacggtggccggggcttccgaagaggtagcgacggaggtagccgaggaggtcacggccacgatttcagcctcagtagtcgaagatgggacgatcgaagaggtggtcgaagacgaggttgagctggtcgcgctactgggttccacagcctcaaccccggcggcagtagtagtcgaagccgcagcaggggcagactcgacctccttcctggaaacatcgacagtggggtgggcggcgttggcggtcttggtggactgcttgaccaaaacagcagtgttgagggtgctggtgctggtgggccactgggtgatggtttcggtgacggtggtggtagtccactgggtcacgtaaacctccttctcaataactctggcacaagtgccgaccgccaaggcggcaacgatgacagcagaacgcattgtaggatttcagacaaagaaacttctccaggaagtttgttaaaaaaaaataagggtcgggattgggtcaagcagatcgactgttgacaaaggagtgtgtaggtagaaaataaatgaatggcaggccgaggagcaccttctttcttcaaagagtgaaagaaagatcagatgcaggcttgagggattggatggagagaagagagaagaagcgaggaggttaaagtggtaaataatgtagaagggggagatgggagatgaggaggggggccgtgcgaatattaaatttaaatgaagtcctggagatggagattgaacttgtaagtgattattttataaattattatatcgtcaagaaaacgtcaatggctttctcctatacttattcccttttcttgggctttccaacctcttgagattcaaacatgcctcgatgtggcacattctatagtacattccacggcctagataccatttcacacagatatgaggctggcgatttagacctccaagagatattctccgtacaacataatctcgtttgaagtattaagggtatgagcatattaaaaattaaaattaagaattagggatatacgatgcgtgatgtgtcccctggaagtatggcctggaccacctctacaacaagtccaccgtatggagcccgtagtcagtactgctaatcagaagaagccctgagaaacaaggtaattaaaagtaccgtgggtttccactccatggaaaatctccgaagtaaactagaaacggagtctacagccgtgaaaaataagggcaagatcttagtatcgcaggcgacagccaacactggaagcccctggccaggaacggtttcaagtgtccacatcggagctttcaccaccaatcagaggaacgtgtcgagaaacaaacaaccccaccagaacacccgcttctcccactaagaaacttggcttggaggccaattcggcagtgagcacgggcggatctgacttagattaaagcaatcaacctcgtttcagccactcaattatgacgagaaggatcgcccgagacactccggagcaaaatgggaattccttgtttttgattatatgtccaagttggagggcatctgtgtagcttttgatattccgaggttccaggccgatggagcactccgttccttggatctgcgacaagtggaagatcatgcgacagccaatcagagcgatatgcccgttggcacacctcgtccacggatccttgtgggactgggcgcgtatacatacaggaaggggaaattccaaaacatcgtattttcaaatctgtacaatcgcatttggccttgtaggagtacggagtagaccactacagaatattccgcagattctagtcttgaacatgtacctccacctttccggcagcagggtccatagtctgaaagtacagaacatccgctctgaaataacgtaaattgtaaaacgtgcaagagttacccaaccaaatgtccaaaaacgccacacaacactcctgatgtaattcaaaaaagtaagtaccaaactcgtagcgctcgctagagatttttagtttggcatttcccagtctcacaaatcatcatgtagttcttggctggctcgccggccttcaaatcttggaagagagcatttcgggatttgagccagaaggacaggtttcccacaaagtctttcagatgtgaggggcgaatgtcgacaagcgaagtgaccacgacagacgaggacacggccacgccggcctcggcccggacacgtcgctggatcaggtcgagtgctgacacgggctcatcgttccgactgaggaaattgtcgccacgtggcttagggaccgaagagacatcgggcgtggagaacacacccgtcactgtgcgagtgccaatctggaggcccacaatcacgtccagcatgcctacaaacaggaaggggtgctggatgatctccaccgcgaaggtgttgcacgtctgccgagccagggtccggtaactctcatccgcgagaagagcggacaggcgcagtagattacgcgcaatgactccgttgatcgaaggtgttgctgactcggtgccagttttgagacggaggatcggggcaggcatgccaggggtgacgacggaaggtgtactgaagtatccggtagctgtagagccactctcatccaagaagtattcattgaggtatcctagaatcacaagttagccacaaggtcccgttcatagaaatggggctattctcactttgcaatcgctccgcaaattgaagatagctgtcgtcgtaagtagcctcatacatatcaagcaatccgctagccaagtatgcgtagtcgtcggcaaaacccggggtgtctccacgacttccatcgcggtaaatgcgccatagctgtcccgtgcctttatcgaagagcttgtccttgatgaaactgattgcccgtgctgccgcttcgcgacaatgcacggccttggagctctcgatctcctcaaacagaacactacacttggcaagcgcaccgatcgccaatccattccaggccacaataatcttgtcatccaggtctggccgcccgcgtgttcgttcgcgataatcgtgcaacttcagctttgacgacttgatgatcttcactacttcttcctcgctaagaccgaagtctctagcgagtttgctcggcgtggcacggacggacaacacgttctggttcatgaactcatcgtgagggtcatactcggggggcacgttgccgtcagggagaacaccccagtgtttggcgcagactggagcatcccgagggccgaggactgaggtgagttccttcagcgaccagacataaaaggcaccctctcgcttttcggtgtcatttggatgggggtaactgtcggcatcttccgaggaaaagaaccctccggtgggcgactgtatcggggcgctcgtcaagtaggcggacaaatcatagacagcgcctaaaagttcggggtcgtgagtaagccggaaagcatccacgtagacatccaacagctgtgcctggtcatacagcatcttctcgaaatgagggagaccccagtccatcgtcacgctgtaccgtgcgaatccatggccgatatggtccctaatgccgccacgagccatgttcactagcgtcgtgacagccatcgcggttgcttgttcacactcatcatgccctacaacatccgtgacctgggtcggataggcaccgagccggattaggaagctgaggttagagggtgtaggaaatttcggtgcgcggccaaagccgccattgaccgagtcgtatcgagaggcgaaatgctgatacgcttcttctagaagctcaatatccatttcctcgtcattatcattatcgcggtcaccatgtgtcccttcctcggcaaactctttcaactgcttggtgatttctttggcgctgtcgagacaacgctgctgttgtgtctgccacacatctctcaatttttctaaaatctccacaaacccgattgcctcggggcccgtgaatgtgtttgaatttgggccttgccagtaagtgccaccaaacacgggctcaaggttaggagtcaaaaacacattcaagggccagccaccagaacccgtcgtggcctggacataattcatgtaaacgtcgtcgatgtctggtcgctcttcgcgatcaaccttgatcgggacgaaggattcgttcagaatcgaggccacctctggtgacataaacgattctctttccatgacatggcaccctaggcaatattagaatgccggtacgcccagtgaaatagttgtaacctacaatgacatgcggagtaaccgatactgagaaagattaaacgattgtgcttcttggcaagctccatagcttttgcatcccagacttgccatgctaccgggttgttcatatgtcctcggacctgttattccatgagcgtgttgccatttatctcataggaacacatctctcacatagggggatttgctttgctgcagacgattgaccattttggagcttgtgtcaggtacgtcatggcgcgggtgtgagtggttgatcgaggcagccattgtcactggatttccaatacttctgctgatcggagactagacgtccatcagcccggggctgaatagtggttattaacgggttctggcagtacctaggtacccaagtttagaagctacccaacgtgggatcgagtcctgatgggatataacggcttgtggcacaaatagtatcttttaaactagggtgagaaatgggccgggttggcgcgggttagagcaggtcggagcgtgtcttgatggataaagtcgtgtgcgggcgcgccatttaggcgggggagtcgaggcaagggtcgcggtcgcgggagatcggccccgtgcgtcatggctgcatcagcaagtcacgtgatctggttgtatagtctacaacatatgtacatgtttagtgtactgtttggtgtggtatttaaggcaccatacatgtctctgctaagtatacatatgttcaaaacataattgggtatcacatcatctaatcgtctcccattagctctgccaactctgcctcttcctctgccgttagcatggattcggctggtttttcctcttcctctttgtctgctgcgggcttctttgcgagttccacggcctgctgaagctcatcgggtcgaagggaccattggcgaatggtcgcatcaattcctacgctgacaatggttgaacctacaagcacaagcccagtgacctcttcgaagtggccagagaaagtatgatgcagtgctccggtctatattaatcagcacatacgcataaaaaaaccaaggaggaaagaggtccttaccgatcggttccacactctaacttcctcgtcccgacaggcagtcacaacccagcctcctgcttcatagacaacaacatcacggacaaagtcaggatgctctagggtcagattggccttccagccatcctctcgaatcaagcatttggcagtcttgtcagccgaagcagtccagagatcaccgtcattatcgaaaaagagcttgtagacactggtctcatgtggaaggagagggtcagtagtatcaccaccgccaaagatactgaattggcgaatctcccggtcacttcctgcactaaatacgattggtttggtgctatccgattctgggtcaagggcaaggtcctggatgctgcgagagtggcccttgaaggtctctaaccgctctccacttgtgatattgaacaccaggacttgtgcatcagcaccaccggagatgagcaggtcctttccaagtaaccttgcacttatgactgattgaacaaagtcgacatggccttcgtacttctgacgtggttggcccgtggccgtatcccagctccagatagcttggtcccagcacccggcaaataggagcttgccatcggggctcaaacaaagacaagtaacaggagccatgggacctgtaaataccttagctgtttcgcctgtctgtagaaatgtaagaatttgcgacggttttgagataacaggtgcacttacggcaaggatgacccttctcacagtgccactgctttgcgcaacataaatcgagccagtatgccagggatctggatgaactgctaggatcttgccctgcagtcgaatagggtttccattggtgttctgagacttggcatctttccgctcctgctcatccaaagacgcgctgtgagggacgtcaatcaacacattccgattcaaagatcaaacaattgctttgactcacgatgtctgaaagaaatgatcccggttcgaagaggtcgtcatcgtgtctccagtctctcaaaaattcaggcaaacgtaacagcagctctcatttttccccatcaacttctcccccgccaacttcaaaattgctatccgagcttacgtcgtccaccgtagcccgtatcctccacaaaaccacagaatttgcgtttcctctcccttcccttctcttcccaacctatctcgtctctccaaatctatccgttttcgtattctttctcttcgtatccctcgtttacttagtccgcgcgatatcgcgcacagctgccatggaaatgaatcacctcatagggtcagtctgaaccggttcggagtcaaggtggccgggagttaacatttggcagtcagcgtttcaacctgatctcgaaaagtgacattcggtgagtttatcagactgtcaattgtcttctccgccattaattgtcttttagttatgtcggtactcttcacgaaatcaaccccgaagcctccacgatagctcttgagaatgtcatgtcattcggttcagaagggcgccgcggcaaccccgccgaggaagttcccccctccaccagtgtttacgagtacatcgtctttcgaggaagtgatgtgaaggacatcagcattgctggggaggatcaaaaggagcccgcaccgcaagaagcacctcgggtacccgatgaccctgccattctcggggtaagtcatcacagctctttccttgatctacaacgtcatcccccacaacccaccgcacattgtctcggcgaattgatcaagtgacgagaaattctcggatgtaaacacatatctgtctgaatgcgcaaaaccatgttgagatttccgttgccttccttctgatgatcaattccccttggacttgttttctgtatcgttttgtatacagcgtgctgactagcacaaatagggcgcgaaacgaccagttcctacccaagggcctgacccgggacttgctccacagactcttcctccccagggccctccccagctgccccagggagctggcccaagccctcccggttaccccccgcagcaccaattccagcaaggtttctaccccccctacggacagcgatttggaccacctcctccgttccctcccggtcccggtttccccccgtatggtgctcctcccggatggtacccgcctccggggcatggattcccccccggtcctggtcaattccagccgccgatgcccattggccctggtcagcaacctggacctccacagcttggacctcagcagcatggttctcagcgcccgggacctcccggtgccgcacccgcatctaagcctacatctgaactcccgatcggggacaagcttcccagcaagtctacgagcggtaacgcaaccccagccgctcagaacgcccccactcctccaaacgactcgaagcctagtgtggccgaagctttgcaggttcctgttagtgctgctcctgtccctcagaagaatggccgagttatgccagctatcccaatcgctgccccaaggcctgctcctccgatcgccaacattcctatcgccgctcggggaaataaccagtctatcactgatgccaccgcggctgccaccgctgccgttgctgccgccatggccaagttgcctcagcctggtgctcaaaagcaaccaggacaggccgaaggtgccgtggatgcgcttacgcagcagatgaatcacatgcgcccttacgacaacacccgtcctccccgaggtggtcaccaccaccctcgcggtggtcgcggcggcgcgcgtcctccgcagcagagcaagaaaatcgaagtcccccaatcggattacgatttccaaactgcaaacgccaagttcaacaagcaggatttggtgaaggaggccattgccactggagttcccgttgctgaagccgaggtccatgcagccgaggaggcagaatccatggaaactatgtcaaacggcggcggctcttcggcccacggctacaaccgcggttcttcctttttcgacaatatctcaagtgaggctcgcgatcgtgaggagaacaccactcgtgttggtggtcgtgagtggcgcggcgaggaggagaaacgcaatatggaaaccttcggacagggtagtgttgatggctaccggcccaactaccgcgggcgcggccgnnnnnnnnnnnnnnnnnnnnnnnnnnnnnnnnnnnnnnnnnnnnnnnnnnnnnnnnnnnnnnnnnnnnnnnnnnnnnnnnnnnnnnnnnnnnnnnnnnnnnnnnnnnnnnnnnnnnnnnnnnnnnnnnnnnnnnnnnnnnagggtagtgttgatggctaccggcccaactaccgcggtcgtggccgtggccgcggctttggtcgtggtcgaggtggttacagccgtggctacggccgtggccgcggtggccgggtcacctctgagtccactggtgtcccatcccagggttgatcgggatttttttgattacatgtctttctagcgatgattgctatcttgttttcatatttggggtggcaagacctatgaccgaaacgaataatcacacttgaatcttttctagtctcttcggcgcaaggcagactggggccgggggcatattgggttggccatgcgatcctgcaacagcaatgtttctttgtgtttctttgtgttttattgttatgttcctttttttttttttttttttttttccatctgccacgcataccctttctgcggcgtcttctgaaattcctggatccggtcgaatcttctctcatgttttcactgtgcagaaagtggcgaatgcaccatgatatctcgtgctcgcccgcatggagcagagatcgttttttttttgtaaatcatctgggaggaaatttccccaatgacctaaatgaaaaggcaaaaaacgaggccgaatggccttccaatctgtttcttccttgtgtatctattctaaagcggtttaatccgcatctcatcgaggcctgagaccccagaaagtagcttaatccggtagtaagttgtatacatcaacatttccacacgtctgtgagcaccagaatttgtcatatctctctcattttgtacatatttatacatatcctggttgtgagctctcttctccgatcttgatacatcatatatcgcacttaccttgaactgaccgcttcttatagattgctaacccagagagcaaccttggaagagtacaccatccacactgagacagctccaatttcgaccattcaaagaacaattggaaaccttccgacattctctacccatgtcccttgcttccattatagattcgccccgccgccatgtgtgtaacacgtagatttcctgtccaggcagtcactgttcagagccggggtttcttgttccttcgttgtagacccaatatatatatctatcgtccatggcgtcccgcagtcttttccagactatctgttatatcaagttacatcaaagacaactccatgtcgtcttccactcaggttgccaacaagttaccctgggatcctaacagtaccaagttcccttcgcggaaagatcttccaaagcttccagatgcacctgatggcgccgcttgggtctggggcaatgatgatgaggtggatactgtcatttatgtcgatatgttctattttatgtcgctgatccatcagatgtataggtgggcagattaaatctcctgacgccgcagcgggtcaaggcatctgctgctgagattgatactggagagatggtgcgactggagtaagtcgagtgaactataagattgaactccgcttacaggtatgaatatcaagccttcctctcacagtacccgagaagccggcttttgaccgcgagatcttgcagcataatatcaaaacgcttgttgatggcattgcctatgatgatacttatatcatgaacacccagagcgggacgcagtgggatgggttccggcatgtaagtgattataaccaccaaacgaaaccttggtctaatacgtccatagttcgcccacattgacagcaagtgcttctacaatggggtatgcaccgaactcgattttccatctcccggaactaatccatcaacacccagaccaaaagcagtgactttgtaggcgacactgtaaacctccgctgcagcatccaccattgggcaatgcacggaattgccggtcgaggaatcctccttgactactaccactacgcgaaaacacataacaagccctacgacccctatacaacacacagcatcaccctatcagagctacaagcatgcgcgatctcacaaggcttagatctacgcccaaagtccgaaggcggcgacatccgcatcggagacattctactcgtacgctccggcttcgtggagcggtactacgagctcaatcctgagcagagatatgcagctgcgacacgctcccacgatgacctgtgctttgcgggactctcgcgcgagtccgctatccgggactggctgcatgattgttattttgcggccgtggcgggcgattcgccgacgtttgagtcgtggcctgttcctgaacatgactatttgcatcagagcttgctggcgctatgggggtgtcctataggggagatgtgggatttggaattgctcgctgagaaatgtcgggccagggggaagtggtctttctttatgactagtgctccggccaatatgcctggtatgtattttgcttgtgggccttgcggctgggtttatgttgggtgtatgagctatgctaactaacgggttgataggtggagttggttcccatgcgaatgccaccgctattctttaggggttttgcggtgtatcgagggtgttaattagtggttgtcaatgcaacgcgacgctacttcgaaccagcttctctattcagctgttgaagacgaactatctatgacaagtctacagtatggaatataatcatccatatcaggtacagcgtcatacataaaagattcatacgaatcatctacctaaaactactaaaaagactaccatcatgtcgtcctcaacgacagaggcagccgactgttcttgttaaagtatacgataatgggcataacgaaacccagcaccctacggtttgtcacttgccaatctttcataagcagtggccagaatatacggcctcataatttcactactgattataactgggacagcattctacatacacacaggagcaggttatttcctaatcttgccccatgacattgttatttcttttcttcctcctttgccgacttccaccctccccctattgctttcgagcggcctgtgtaggcttttgccctatgacaagatagaaatatgaataaagccgcagatccttttgttgtaattcctcctgcacccgactaatcagggcatcagtgtcttcctttgaccagcccaatgtcctggtgaatagacggagcgtatatccttccagcgcgcactgcatctggtacacatagaaactcccaattcttttcagatttaggtcgtcactccacttgccaaagggaacctagttgcaggcactccaaattcagccgcttaggctacaatacgcacaatgattatctttgatttttgttccattttaggctcacctaccttgaatatctgttcatcgacttgcacaaagccagctgagtgcatcagctccttctgctcgactgctacgttgattcgcttgtcaaacttggtcgccgcctcgtgtatcagcgcctcccactcccttagtgccactagccgggcttcatcctgtgcgttatcggtaaagaagtgcaagtcattctcccacacttctaaccaccccccggggagaagatgccggaacgcgttagcgtaggacctatcatagtcggtaatcatcccgcctagcgactgcgcatgaatcagatgaaacgcctgttttgtagtgaacggccaatcgccctcaagctcgtggcgttcaagatacgggagatttggagacatatcggtcaggtccatacccgttaagcgcggggcaggacgatgctggtccagcgccatgatcgtccaggagccgctacgggtagcgaactcgagaaacttatggtttttcttggccggatctaggggggcaataaaggttctgccgtctagaagatgccagatggtgctgatcatcgcgtgtgctgtggtagcgttttcgtcgtctggaaaggggaattcgggcttgaagccataatagcggcgtccattttcgtatgtgtggttattgcgtgcagtcagccagttcgattccatttttcttcggtcagctacctttccttttctcgtgggtagagatcgggggagtagtagtttatatatactcctctctgctacagtgaagagcaacacatagattgtcccagtcgatttctaacggtcttgagtcatcaggcgtcttgagatctgaatcccacgattttgcgggccttggagttgtggggtgtgggggacgctagtgggcggtctaatggcctggcaggtcttgagacggcggaatccggggttgtcgtttcttgtttccttcaaaggtgaaatttcatcttccggtctttcgcaaggcaccagattatcagttccaccatgagcacccagacgcaaatagagacaatcgtgctacagacaagagcttccaccgaaacaatcccagccgagaatgaaacattccaagactcaagatcccccgaaccaaaatggatgtatgccaaaatcctcagcgcggggttgtccttcttcgtcgcgggggtcaacgatggaagtctaggatcgatcattccctacgtgatacgcacctacgatatcggaacaaacatggtagccgtcctgtaagtacgaagcgcagaccaaggatatccatctgcaatacaacactaacatatccagatatggcacaaccttcttcggctggctagtcgctgccctaagcaacggcaaaataacccaatacctagacctaggcccaattctgagcctaggcgccaccatccaagtcctagcccaagttctgcgcgtctgggaacccccattcgcactgtacgtggtaacattcttcctcgccagcttgggtcaagcatacaacgacacacacgctaataccttcgtctcggcgctgagcggcgcgcaccgctggcttggctttatccacgctatgtacatggccgggtgtttggttggccctttcgtagcgacgggcgtggcgtccgctaatgtcgattcgaagtggtatctgttctatcttttcccgcttggcgtgggtgtggtgaatcttgcgtttgtgggtgtttcgttccgggatcgtatggctacgccgactgtcttgaggagtgagcgaggaggtagaattgcttcgaattctgcgctcaaggagatcaaggatacgctttctacccctggggtttggctgctgagtttgttcttttttttctttcttggggctactatcaccgctggaggtttgtcttctcttgcttgcttctctgcgtgttctgtgttctgtaaaactgattgtatcaggctggatggtcgagtaccttgtcaacgtccgcaacggcgacgtcaaagcaatgggttatatcccagccggcttctacggcggcgcctttctaggacgtcttatcctcgctgagcctacgcatagactcggcgagcgacgaatgatctttttttacgctttgctatgtgtgggtttgcagttggtattctggctgtgagtttggcactcctctatgatatatttctaccaaccccgatatactgcattgtctgtactaatcctggtggtttaccagcgtcccgaatatcatcaccgaggcagtagcagtcagtctattgggattcttctctggtcctttcttcgcaacagtaagtgtttatcactgaattttcctgatcccaccctaacatctagcttagggtatatcggtcggctcaaagatcttctcgccacagatccgctcttcggcaatcggtaagcgaacagccttgcccattattcgcgggggtttactaataatccattaagcattcgtcttcgtcctcggtcaaatcggtggatcggtctttcccgctttgacgggaattatcgcgggacaggttggtgtccaggtcctgcagcctatgcttgttgggttgctaggtgccgctggtgtgagctggttaatcttgcctaaggatactgcgttgcatcaagattgaggggattataaaatgagcttcgtggtattcggcgggggtgaacaggacagctttcaaagattaaacaaaccaaggaactagggtataaacattcattacttcgttacatcacgacgaccaatagtgccagaagccagaatcatcaaccagaaagaaacccaatgagatacacacattcccacaattataaagaccaattactcaacataagaaaccccataagcatcattcctcataaggaaataaatggaacccaaagcccttagaagatatcatcgggccattggtaatcctcaaggccagaaatcatagaacccacagtagaaggtgacgtagaaaacacaggggcagacacaggtctctttttggctggcttattcactttgactttgactttggcagcactcgagcgaagttcttcagggaggggcggtacgggaggaatatcatcgtcacggggatatccagatcgtctccgactaggacttgtcttcgaccgcgtcggggtgtgagggctacgatcagggttgagctggcgttgtgggtggtgatagaaggcttcacggtgggagtcacttggcggagcaggaagaggcgtagaccagatggtggagcgggaatcgtcgtccgagacagcggcaggcgaagataccgggcgcagactgggctgactcttcttcatgcggataggggttgtgggcttggaacttggtgagcgggtggttccggggacttttcggggttgaacgtagggagaccttttgatgttgctcgtggcacttgtatttcctcctgcattactttcttcggtttcggtcgagggggctgcgtggttgatggcttgcttgcgcttggccgatccagggctctcgccggcctcggatttcggccatttcggttttccggatggactcagtagaccggagtcaatcagcatggcgagatcggggtcgtcgatgcccttcttcggacagggctgaggagggctcccactatcgatagattcaggaatggaagacttccgtttacgggagcggtccttacccattgacgccggctgtgtcccttttgagcgccattttggactttgagctttagccgggctttgaggggatcttggttcttcgaaggagaaattttcacggtcttcaatggatgacagggccgtcagattggccgcttcagatccagacgccttgttttctgcggcttgttgatccagaagcctttcagacggtagagagggaagggcaccagggacgaacttccttgggaacaatgcgggatccatctcggcattgggaatatttgcttgggctgtaggtactggggcccgctcctcgttgcctgtgagttcacgaagctcccgccgggcacgttgcagtttctcctcgaggttgctaactttcttgagcagcttggtttggcgcgagagttccctgcgggagggttgcttgcgcagtccagtcggctcgtattcatcggaagttctatcgcaatacactgccggggaagcagatggggatttgaagaatgacttcgtcaggcgaagatcttgaagggaggagcgtttggaagctgaagactcagaacgtgatggcgcaccacggttttcttcaattgggtggtgatacgggtctttgactggagagctgtattccatcttgtgctggatcgaccgccaagtctggtcggcgagagcagtgttgacaccaagatcctcagtgtaatgacccttattggttccctggtagccagccttctttaattccgcataggccttctccgcctggctaatgacatccttctgcggcgacttattcggcgatccctcagagtttctgccccatccaccgaagggattaaatgccgaggcaatagccttcccaaaacgaaaaatcccagatgagcggtgctgaatgccagcctgtttgttttcctggaggtagatactgggcggcttttcgctgacactatcactcatagtcgcttcaatgaatcgcgatgtccgtcctctgggacggcgcgggctggaagcagatgccgcggcatgacgagcgcgcagcgaagccagcgagccacgaggtgaagcgcggggcgaaaccttgtagcctgcgccattcgcgctcacgttgagactcccgttttcaccgcgttgggtgcggcgctcatgggatccgtaatcagcggcttcttcgggcaacggccagtcgttcgagcgacgtcgtttgctcagcttcgctgccggcgatcggtggccgtctgcatctgcttgcgcctcttcggcatcgtcgaattgtccagagatatctgagctccaatccgagtcatcgtcgtcgctggatcgtaggtgcttgcgggaggagcgctggtgtgcggggcttgggtcgatgtctatctccatttccattttggagtcgcgggcgctgaaatgacgcagggaggttagattcggtctgtcttatgcgggctttgagcttcctttaagttggattatgagaagggaccttacctttgcagcttgcgttatccttttttccccacgcccttggaaagatgtcgcaaaagtctgtcagaagttggcatagaaatggagtcgagtgctgagagggaagaaataaaggtaagaaatgaggatcgaaatgaagatctcgggagactcgagcaaaggtgatgcgccggtttgtttacatactccgcacttgccaagggggaggtttgttgtggtacctggtacctgtgtctacccctaatctatcgcaatccacaaagtacccaatacttcaagaatgtcccatatccccaaaacaaacactacaaatatgtatatctgtatgaactcgatgctatgtagaattccgcgtgtctcagacatgtgtatgttcgataggaatgtagatatgatatgtcacttagagatatgtatagttaggacagataacgcttgctaaataatggatgcacatgcattctgatgaattggtgcaattcgtagattgaagtaaaaagaacgtcagaatgctaaatgtaggtataaggagatgctacaacaccagtataaagagtagattcaccagatgtgaagtataaaacccatgagaccagcccttgtctgtccggaaagagtatgttccaagagcaatgttgaagaaaatcccagctacagtgagataagagtgacattccctgttccgatcccatcggatgaaaggaacgaggcgcgttgctcttgatgatatagtgaggtaattcgcgaatgatcattgccgctgagagtaagaagagccagctgcccttcctatgcaactccgaattttggccaaacaaatgtctcgcaaagtagtggaacatgaaagaggaaaccagttccccaagagatgagtccaaatgcataaataaatctagggctcgagtagcctcaatgaggaaccagaagataagttatatacaaaaaaaatgcaatcggacccattgacgggttcaagactcgtcgaggcaagcccaaggaaagtatatcgtgttcagccaatatggcaagatattttgaactcattttagatcttattaactcgatggaggagctttcatgaccattttgccgttggcacgcttgtacgccaactcaatgcccatttccgccataagtgcagcgcgactttctcctgagaaatcgcgataacccggataaggctcggtgtcaggccgcatgccattctgcattgatcgttcatcaaggccgaaagtatcttcatggctccttttgccgtaagttggcccagtttggtacaccatacgcttccccctaacgttgtcatacccaccgccgctaccgccgggtgaagtgctttccacagaaggaacaatgtggtttgcatattcatttggtaagggcttgagagacggggtggcctggaccaaggtcggtgtttgaggacgtgacaccggaatatgggacatgtattggtataaagctggttcagccatgcggggatccatgtatgaggtcgcttttggtggctccatgccataagaattcatacctgacatggagtaagctcctcgttccgagggtatttgaggtgccggatacgcaatgggcgttccttcgtattcggatgcattggatgggtgtcttatctgggcatatgcgttctgtggggagtagataccttgcgataccactggtgggggtgtaggaggcatgtgaggagccggataatgcgaaggcgtggagccaaatgaaaggtgtgattggtatgagggtgtttgagagtgtgtcatagggggtgcaggtggcatgggtctttggtagggttgcgggcactggaagccatagtcgggtgcagatggtcgtcgatctggaggaacgaacccgtagggcgattcgatattgctgccattgctgttcgacctagggcgatctatcgaagctgcgtatctgtcgggtgtcgcgaaacgatccgacgatcttgcatacgccgctgcgcgttcctcgccgaattcataatcctcatctcgcttgtcgccccggcgcctcattcgaacatcacgacgaatgcgaacacggcaaccctgctccgcaatgatacggctcagagatgtgctggtcgctaggccggggaatttcttagcgctataaacggtaaagggtaccgacttgacctcgagacggaaatgaagaaacgcgtgcggggtgcccggctttgctgcagcggaaagaggtatttggttgggaagaggcaaggcggaatccttgtcggtatccttggggtccttgatttcttcgtacaggtggaagcttaagcggtaccggccctcatggcgcactgacaggtctgggaagatgaaatagcctgcttgtgaagggcggtcgagatatgctaccccggcgactggcacaccagtcaatacagggcacgactgtggtccacccacccgcccgtgggccataggacgtgcggtgtcaagggttgcgtagaggaagaaattggcattgtaggcgaaggtgatatcggtcttttgtgcgtcgttagccgggtcggactcgaagatgcgtaactcaaccacaggcggtgggtcaacagggcgacggtcggctgatgctatttaggatggtcagtcaacgcgcggccctgatcaggctcaacggcaaatactgacactttgctcctgcgccgcatgctcttgcccgctctggttgttgcatcacgctcaatttgtatgtaagctgtttgccctcccgcgtgatccgggtgactgagtgctccgtctcattatgaggtgccatgatgggtggtctgttggccatttttgcggattgatattatcgttgctagatattctgccggtcgcaatatcagtaaatgtcgatcgcatggttgggggttcgtcctatgtcaatttttccatggagcgcaacatacaatccgtaatcaatggggccttggacgaggtggtttaaggtgggatatcgccttcttctcccccagttcctggcctcacatgagctgttggaaagacttccgaggttgcagtcaagccgataaaaccccccacatacaggaacagaacaaaaactagtccccgatgaattcgggaaaatgcacttcaaataaacaagtgatggaagagtagaggagaagagagggggcagagtgggaattggtgacactaacaagaccccgagccctgggccctctcagtatcaacagaagtacctgttcgatccgcagtggtccccgtaaaccccgtgtggttcccttaatttttttttttttctagtttctattgttctcgataatccctattattttggaagaaaaaacagacaccaaatagatatatactctaagcatgtcatatatgtgtgttacattcaaatctacgagagtcgtgtctttagggctttgaataatacttccaggtaattaataatcatcgaatttgatcccaaaaaaggcaaaatgactggtaaactatttatttctcgatttattttccatggaacgacctctccacgttacccggcgtctatattccgttccaaggttccggccgcaacccagtccaacggatcggagtctctttattttccctggtctccataacgtcctatgcttatattgtagtctacatcattctatggatgagcttgttcaaacaaatatggcggttttaaaagttccaggatcaatgttgattgatgagaatagattgcactgagggatttcaaataccgcgtattcccattacaggtctagtccccctgagaacatcgaccaatttagacattgattgttaatcgccaaaggacaatcgagctgaactccatcgaactaccgattccctctcacaacctggcttggctgaccccactaagccaatcagcaatgtctcgaatgagcagctagacggtttctggcagcaatccccaactgccagctgttcatccaatgcgcgtacagttctatgataaaattttgatctgcaaatcctcgttttcgctgaatccttggccatccctgtctattgcgggaactcggatgatcttctgatttgcctattatggcggataaatcatgcatacttttttccatttcctcttgcaaggcacgatttacagatttatggagaatggtcttgggaatggtctccagaatgtccaaagtacggagtacggagtacacatacgaagcacaatgtcccacctaggcaaatgttgaaagtcacgtcagctcaatcgaggagttattcctcggtattattccgtcaacagttatcggattccctgtcagtttgaacctaatatcgtaccatcacccctccctggtctgccacattgtatgtagacctgttcggtgattcatcccaactcataaacccaaaattgagaaagctccttcgtactgcatttgggggcctgcagatttagttcattacgtggtacaggatctaggaattccagaccgggccagttctaacggctcttttgatatgcacttatccttgttgtaatgtacggagtatgatacatggttattccgaaatagattcttgataactatggagtcctcgtacgaagtactccgtaatgatgtactagtatattcaattgcagatcgcccttgtattttgaaacccattggggccgatgcatccgtgccgaatgacaggcattgatatgatggagccctcctgcccaggtgccgtcccgaccaagacaatagtccaaacgcagagacaagtccagaatgctaccattatcacagccgctttgacaggcgctccgagccgagacagattacgagtttatgcacggagtatggagtacgaggtatagagtagcatgattcgtttaaaggggagcacttgcatatatctatatgcatgcgagaaagactcttaccgatacagataaatgtcattacatcatatactagagtcattgcacttgtccacatagcccattatttctctgcggtatctgtaacagcgctcttcacagacataggataaaatataatatgtatagaacaactgccgagaaagagcatgccaagcgctaacgaagttttcgcaatagtgtatccttctagaatatcgaagcgcgaaattatggcaatgttacctatgatcttcggggggctgggggaagccacactaacggctgaaatcattcaaggatcggaggtggataaggcggttgtatcaattgcgtacaaagtactccaaacggagtaccccgtaaagtcatattctcttagaactaccccattagaaactatcgtctatcatagattattgcccagtgggtgactgttcgcattgagctatggattcccaacccctgcaacatatcttagtggggttgaagctttgacaaagcttggaccgagtgtgtatgtatgtacaacagtacgtatggactacggagtaagaaacataaggaataaaatagatccaagagcgcatcacttgcaaaatacgtatggagtggacgatcctcagctccacaaggagatatgccgggtctagatgatatactagacttacactatcgcttggaatatcttggaataactaagttttgattgtcacttacaacatactccgtagttactggcgagtgggccgatgggattttgatcgactatttagagctgatgcagtactagtctctcatggcccgacttccccgaagccacattttatccacctgcctaatgcagaacaccaaaggtaccagcttgtattctgcattttatatatattgtagcagttcagctgtcatggctggttaactaggtaacaagagggaactttgatgaagcgtatatgttttgtgtataaataataaagtaatctcggcgatccagttcatccataagatctctcttgactcattctgtagttctccatactcgggggcgatcagctgggaaaccttacatatgtacggggttagtttgaactttgaggctgacatcagaatattgaggcggaaatgaacaacaactactagttctactttaggtatggggatgagtccgttggagtgatatcattcgaacctctgctaagcctcaaggactattacaatcaaggcattgctttgtatgcctaaaaataatcttactgcatgtgccttttcttgctgttgagcatccatgtaggcctcgtttgccttgttgccttaaagctctgaggctctatctagcataactagcgttatgcctgctattttagagaactatgggttcttctgctctctgtctttggttttccttgtgaggcctagtttacctcgcccctattcaaagctagtagggtcaaaaagagacaatattccatagattaacccaactgtcatcttgaagtagtcaagcaaaaacaaactgtgtgttaacaatcgcaaggtccttaacatatacgatgttcagtggactgtttcacaagttggatctattcttgactttccaacacaacaacattcaatccctagatcacaactcctgaaaacttcttaacaccaacatgaaaagtcctccagcatagtccgcccatacaacaggcggtataattctgccgaaaagtgaggttatattgaactttaaggatgtcccttcgcccttcggggcatatggtcaaatgaaaatatacagagaagattagcatggcccctgcactaaggatgacacgctcaatcaaagagaagctacctatttttttttcttttacaggtcctttttgaggttatacgggtgtgggtctttatgatgacatataattggtcctacgcttttaggaagtcacgtggtatatagtatccacgtcgaaggttcgaatcgaccaatggtagaatattattattccccgctgtgattggcttaggccttaacagtctagagtcgcaacatcaactcccatatcggctgcgcttcctatggatcttctattagtcttacctggatttgaaacaaagcacttcgcacatatcctacctcccctggagcgagctaaagtcaccaccgtcgacgtcatcactcttgactcactcgagatcgcgaaacgtgcccgtgtacctcccgcagatgttcgccggctctcctcctctattgtcgaggcattgcataccgatattggctttgaaaagccacatacaaacacagggaccagcgatgagcctagctctagtataaaccctgatgcggcgaggacactcagctcctcgacgaaacgcgcgttgcaatggaacactataagcacccttgaccccacgatggatgcactgctaggaggcgggattccaacggggtatgtcacagaaattacaggcgagaggtatgttgcaggtgctcatccatgtcttataaggacaggcaggtcaatctgacatgtggatcgatgtccagtggaagcggcaagacccagttccttctcagcctatgtctagccgtccagctacccaaaccacaggggctacgacggcgtgccatgtacatatcgacagaacatccattatctacgccccgactttcacagctcctagaatgccatcctgtcctctcagcactcccggccgagcaggcgccctcgctacagaatatactgtccgtcaacgccatggacctggagatgcaagatcatatcttgaatttccaacttcccgtcgcgatcgaacgttatgacatcggcctagtcatcatcgattcaataacatccaattaccgcgctgaacacgaatcgaacagcatgcaagccctcgccaagcgatcaaccgagctcgcaaaactaggccatctactgcgcaatctcgccgtaaaggaagacgtcgctatcgtgctctcgaaccaagtctacgaccgtttcgagcctataaaaagcagccagtcaaccccacgcgcagggtttccatccataccaagtcaaacggcaggacgtggatccggccctgcctcccccttcccgaagtctcgcactgaacagctagctactggaaatagccagcagccgccatcctctacccctgctatttcctcatcgccatatcacgcaccacatgataaatacttcgacggctcgtacctgattgctcctcgagcacacagtagcttgttgaacgtcgctcaccaggagcgcttccactctggctggggagatggcgcatacccggagactggaccactgaagaatccagccctaggactcgtctggtcaacgcagatcgcctgtcgaatcgcactgaaaaaggaagagtctttcactgtaggcgtttctatgggtgacgatgcatccacacaggaatctcaattccaagatggagtcaatggcaacacctctcgagacccggactcattagcaatgcctgctccctatcgcaagaaccaaatctctaattcgcagaactaccagcccaacccaggctctgaatccaccacacggaggactatgaaacttgtgttctcaccatggacggcagggccgaaggatacaccgagaaagggccaaccgaatagaagaaatggcgaggtagagtttgaaatctggaaaggtggcgtgagaagtacgtgtcgtggtgaatgatgcatatactataaacgactccattcgtgcccaaagcccaaagcttcagtgcgtcttggaaaggctcgactgtgatttactccagatactagtttgatatactatgttggtatgtcctcgtattggaataagcagtacacctctgtagtacggcggtttggccgagtggcacgggttgaatcctgttgccggctcgaaatatctaccaaccaactgtcctaccataacttctattttgctaaacttctcttaatttaattcggagatgccgaatatgtatctagaatataccgagcaaagaagagagagttagaatatcaaggtggaatatcgctgtagatgaccttctaattctcatgaatcataccacttgaccattggctctagtctttttgtatgcaaagaagaaagtgaaaaaggatgaaaacgcttcaaattaaccacaatcatatatatggacgtctctctaaattaacacatctctttctccccttttcaggttcctttcttctcccccccaacatcctccgacatgctcaaaccctcaccgcagaaacaagataatggatctaaggatcaaaggcaaagagatataatgtgaagacccgagaccacaacgacaatcacaagagaagaatcatgagcgtctcaaaaagagaaaaaaagaaaagcatcaaatttgacttatgacttccgcccaacttctcaagaaaaaaatcgtattgaccttgtgtatatccatccgaaagtatacacagtatacaaataaaacaaagctcaaatcaagtcggaacaatgcaagaggggagaaaaagaaacatcatcagaaccgaacaaaaggcattcaaggcatcaaggcaacatctattgagccttggccaccatcttggaaggaggaatgccgatgccgttgctgttacggtagaacatgacacccttgctctcgccaacggcaccctcggtgggctcaacccagtggcagacacgggcggcggtccacatggccttgaagaaaccagtccagccggtgtgagcctcagtgcggtagtggtcgcccatgacgcccttgatggcatcgctggcctcgtcggcgttgtagaaggggatgttgctgacatagtggtgcagcacgtgggtctcgatgataccgtggaagatgtggcggccgacgaagccgaagtcgcggtcgatggtagcggcagcgccgcgggcgaagttccacacttcaggctggtagtgagggagagtggggtcggtgtgctgaaggaatgtaatggcaactgaaaatattgttagcaaaagggatccgagagaaccgagatttgaaacttaccgagccagtggttcacccacaagtacgggagaccgtaccagaccaacaggttcaaccagccgaacttggagccgatgaagtacaaggcagtgcccgtaaggacaagacccaagtcactcaggacaatcagcttggcgtccttggcctcgtacagagggctggaggggctgaagtggttgacaccgccgccccagccgttgtacttgcccacaccgcggccctcgggctggcgggcgtggttgttgtggccggtaacgttgttgagcaggtacagaggccagccgaagagctgctgggccagaaggttggcggcagtcaagatgggagtctcctcgcaaagctcaccgagctcgtgcagggtcttgccgacgcgggtagcgtactgctcacgggtcttgggcacgaagaccatgtcgcgagccaggttaccagtggccttgtggtgcttgccgtgggagatcttccaggaaaagtagggcacaagcaggagggagtggcagatccagccaacagtgtcgttcagaaccttggagggagagaaggcctggtgaccgcactcgtgagccagaacccagacgccggtgccgaaaagaccctgtacgatggtgtacaaggtccagagggccacgcgggctggcatgaaggggaccgtctcgggggtgacatagttgtggaagagataaaagacggaggcaaggatggccagatcccggaagacatagtacaaacttgtggcggcggagcggtggaagcagtgagcgggaatggcatcgcggatctgcttgatggtgtagtctgggatcttgaactcgttaccgtaggtatcgatcatcttgctgacctcctgctccgaagccatggaagaaagggaggtagaggagggggactggcgagggctgtcaaagggcgaggccgaaacagagctggttgttgaggactctgtagcggggttgcgattgagcgcaacgcgcttggggattgcggtcgacgacatgttggatgaggttgacagtgttcaactccgaagtcacgatgggtatactcccaatgtgtccctactgaaatgaaacaaaggaccggggtttcaagacaagggatctgagattggattagttgagattcgtcaagttgagggcctggggtttactcacgatattttgagtttgggggagtgtagtcgcactagggacagaggttgaagcagatccaagcaagtgccccgttttgaaagagagccaacgagaaagcaggcaattgactagcagggaagaaaagaaagacacgggagaagagaagggatagctctctctttcaaagagaaacagaaaaagcgaaggggagaaatcgaaaaaaataaaagcgcatggaaccgtggggaggtaatttgcataccgccactctctgtggaaggccaatccaaccgtattgcgttttgaaaaatacaccccatctccactcccttcgccctcgacagctgagttttaacgcgaactggccagaagagtaagaatagggctgatcttgtcttgtctgtctattcacatgccgattccattactatgtatgtatgtatgttgtactccatcttcttacttcgatgcgctttctactctgtgtgttcttcatagccaccgcctttccaccagatcccgttcgccccaacgctttcgttattcgctgatgtgatctagacttccccggtgattgtacctctttcacatgccggcaatacgttgaaatccccaactatatgtgggcagatcggaccaacgtgcctcggtgtttgctgggggtttgctaggggtttgctgtacattggtttaggaacctcccatcgaatccgagctcccaccgaatccgagatgcactatcacatacggagtatattgtacgaagtactccgtatggggtagcaattggttttgctttttgcaactattgaaatgcaatatccagcccctgaaccccctacaatataggacagacatgagtgactgtctcttctgtgctccgtaagcccgcatgtacggagtaagcccccatcagagctggagatggactcggcagtggcatgcgcaagggacatgtgatccactttgggttttcgggtgtccgggtataatccggcgatgggctattatctgttctgttctgttcagatcaatccagtctggaaggaagaatagaatactaatctcgagaagctaactataaatcataaatctataaatactgtgtctacaaataagcatatccacgttaaagtagagtgcaaaatacgccctcgataccctcgatacatactccgttatatacaaatcgcctcttgttgggacccttcgggttttgttggggccccactccccctttttgaaaaatacgcaaacgttaatttttactttccgatgtttaattctttagcccctggggccatcacccgtggacaccaccttgccaccttagataagatctgatcgggcggggaccgaggcgccgatctcggacttttgtatattccagaagtgacggcctttcttctgtatgagttatttctatagttcatcaaaaaccaactcttcaatcggtatccagcttactcaagagggtacaagaagccataagtgggcctgcaaccccgtagaagcgacctaaaagaacatcgagttcagctagagattaggctaatccagattaggccacactagtctgtatcgggtcaagggccaacggaagcaagccactagaatatattaccgaggatagcaatggagtacggagtacgattgaagatttcccagaagaataatggattcatgaatcgtagatctaaatacaaacaagtacctcagctagctcatatacgactcattatacatatagttacccacacaccccgcacagacctaacgaacctcctccgtccgtcgctccgaatccacaagccaagatcccccaccagcagcgtgattaccgccagcggcactaagactcacggtcgtcttcttcaaatctgggagtacaagaaccgtctcactatggttacggtagtcaatctcacaagggatcgagcgacgagccggcgccatggaaccagccggatcggccgctgtcgggagctgcggagcggatggcaggaacgtacggatctcaatagccgggagaaggagatggcctggtttctgagggaggagtagaaccgtgaagcgtttggtttcgccgtcacgcgcgaggaaattgccccgccgccggccacctatttgccacaagtctggattgccgtgcacctcgtaggagcattcgaggggttggtcggcgttcccgcgggtcgcgggggaacaccagcggcgcgtgtggcggagacatagctcggcggtgatcatctggccgacggcggcgtgggcggagggccccggatcggtggtggctttgggctggagctggaggtcggctgtgtgcacgactgggatctcggggacgtcgacggggatgatgatgcggcgagtcgggatcgtgggttgtgcggggagctggatggtggagttattctgtttcatatgtgagtaacctcgctcgaaacactcgggttggttcttaccttgtgccattccttgagccactgtcgcacatcctcgccgggtgatttcaaagctccaagcagatcgtcccatcgcacagtctgatagggcagcatgtttacctccctaatcagcccaatggcttccatgtcattcgtggacagctgtgcgcggaaactgctgacaatgtgcgatgtaagcagcgatgcgtactggcagaatggactggagttgatagaagctgagaattgcttttcgactgcgtcgagacactcatcgtcgatacatgtgaagtcaacgctcagttgtaggctacgcggtgttgatgcgattgtgttgccttcattatggcggattttgtaaagaagagacgcgggctgcttggggaagacatcaagggcaacggggccggtgatgctgctttccacatcgtaaatgtctgagctaggtagactgcagttcatgatacgaagcgggatcagcatggccgggctaatggtgaagcgtgagaatagtatttcgtccttgaaaatgtcctgcacgttgaccgatataggtagcgtggaaacgacattaaatgacgccgaggaagcgaatcggccttgctcggtctcataaccaatctctgctcgcgcggagagggtcgaaaacgcctcctccacagtgtaggggatacgcagtcgaacgaatgactgcgcgggaaattccgcgaattcgataatgcccgactcgtggttggcatccacctcgagcgtgccctccacaacctccgtctctgcaaggcgaagccgtaggcctgcagtacccggccggacacggatcgtgccactcttgatatcgttgcgtccgctgtggagttccagctccaacgtccgcatggcctggaggttaatgatatgcggtgacacgatcttcgcccgtagggcttcggccggagggtaacaatagatataaggctggttgtcggtttcctccgaatcttccgtttctcggaagccaactggaagggtggagtcttgcccgccgttgaagttaaagacaagattgccagccctcatctcgagacggtcaatgaaatacttgccttgaagtgtagtctgcgtaaaagttagttacttgtagcgaaagttatcctacgagtgcttaccgagcagtcaatcaaaagctgtgttgttgatgatttcaccacgaacttggctgagctctcgatccaatgctcagaattctgagagctgttagcgctgaccagccgaaccttgagattgtcaatctcgatctgctgacccaagaggaatcgcaaagacagttggatctggaatccatccttgtcgtcgtacagtcgaatagctgggtcgacacggagttcgccaaagaagtccgtcaaggaagcagggatatccttttgaagagcaccagacgcttcaaacaaatcatggacatgtccttctaacatctcttgttcagtagatggaatcgtgccagccacggacttttgcctgactgacaattgcgcctgcgcatatgtagcaaatttagaaagcaaccgtatcatcatccggacatagtcctcgttccgtttgagctccttcaagcaccgcgcgtggagttctaacatgcttccttccagaataatccagtacttagagccgtagaagggagccatccgatggaaataggaagcagcagactcgtagtctttccggcggtatcgtatgatagcgatttcagccagggcctgttcgacggagttgacacggttggctgccatatgatggcggatcaaacggtctgtgagctcttcatagagaaacaggaaggcgtcttgcgactttaatgcggccttgaggccagaaagatgaatgcccgcaagcgacgattccttcttcttgggggtctgtgactcttcagtgtcatcgccatccaacgaaatctccgcgagttcacttgccccagaacgatagcgatcatcaaagagaagaccgaggttgttccagttttcagaccagccccgtctgcgagcaatctcctcgagagatcgccgagccagaagaagcaattccgccctcccggatgagagctgttcagaaccagtcttcagtgtgagaataggcgcggtcttggggtgttccatagtcgaccgccgctgaagcaaacccgcactatcggagatatcctgggtcactggccggccaggttgggcaccaggtgatcctatgagggaactagagcggcgaggcacattggtacgggaatctgccaccgtggcagcagcggcttcggtcgattgcgtaacggcatgcagggaggattcggggagcatgagggtcggagtagaggtttgactcaggatctggaaagctgccgagaatgcccacgtggagactagattgttgataatatctgccttgtcatcatgaactacctccgccagaccgcattcgagatcatagcggagggtacgtgcagctaaactgatcaattccgttgctcttgcgcaaatctcagctagcagaataagattttcgggcttcttgcctgatttcgccgcgttaccccctgccgcaggttcgctgccggccagtgatggagctctcgcggctcggagtagtagagtcagttgacgagagaagatgtatgtacggaaatcgaagattgagatatcgctggccaaaatcatttctcggtatgacatcttgttggcgttaaatgggaaatcccccggttgaagctctgaaaagagagccgcttcatcttcaacgccgtcgctgtcatcggaagcttcggtctctaacgcttttttggccctctcggtccagcttttactggtgaccgagagtgcgccactgtgttgatcattactcccatcgagctggtctcgaatagccgcatccaagccaacagctagctcatcgtatcctgccaacgcatcttcaaacaggcccacattctcgaaccccctagccagaccttccttaaggatgaagaacgtgcagaagttccagccaggcaaactgcgctgagagtctttctcctttatatcctcctcatactgcgccacacgcagatcaaacgaagctagaatcccgttcttcattttatcaatcaaatcctccaactgctcggctaattcaggggatttggtccccggcttcggaagacgcagttgggccacacggtccacggcagacttggacgacccattgaaatcagccttcgccttttccagcactgtagttgatccacggccccatttggaggtagtggccgccctgtccgcggcatcaccgtccggttccacgtgcaggataagccactcgaacgcatcgtgcttttcctgactagtagttgcgggctgcgagctctgggaagatgcgttggccttgatccattcgcgaaggttccgtcgggctgtcgccttgtaggtttcgttgtcgtcgcatcggaggaggtaaactttcaggtatggtgtctgccgtagaccggggatctggtgtctgcgatgggcaactgtgccatggacagtgtcgctcgatgattcgcgctcgtttgattcttgcgcaggtacgaagccgatgcggagcgactcgattgaccgcacggggcgggtgggcgatttccagtggaggttttttagggggagctttgcttcgatcacgggctgaatgagcgggaacaagcccgacggatctgtgtattcgactgtattgtacggtcagcgcaagcgcaagcttcattcgtctcaagcaccttggtcgtacccgttacattgctcgaagcctgcgaagggtccatgatttcccgggcgcgatacgggaagtggccaattgacttcaggacatctcaatatccaaggtgcatgggagatttcatgcgtctggagttaaggggaaagtcgcggggtgagggagacatgctgtcaacagcggccacgcacggcctcgttcttttccattttagtgcgccatttcagtgctgcttttagatttggatcacaactgggcttttctttgttttaatatttaatttagagacatatataactctagatatgcacaaaatataggaatctatatattgtactatatgtgacatatattcaacagaaaactccgtaccaccatggccccggatctatacacgacctcacacttcaacctcaaacaccttcgctagcacggcaccaccaaccaaaagaatccctgcctgtataggcagtccaatacgatctgccacagaaaaaggaaccagagcttggttttgtggcctcagcatctgtggataaaagaacccagttgatgtgacacccagccatgccatagaccacgttaggccaagagccctttgccacagcggtttagggattttttgacttggtccacaaaaagatttccaaagtgctttgacgctatcttcgatcatgagacctagaggggccgtgatgaagaataacatggcgccggattcctgcgctgggattccttggacaatatcaaggacgagatgcaggccgcccgaacaggagaaaacaatcaaaacattcatataccgtgctatcaacgaccttcgggtaagacctaatatgtcccgagtgatgaaggcgctgacagatgtcaggggattttgcaacaattggtgccagaatttcctacaatatcgatgtgagtataatatcccttatctttatataactcgatgtgaatgagcttacccccagaagccccgtaccgtatcggcatccagcgctcttccgaacaacggagggcaattcgcaggcgaatcgagtccaagtcctacggcaataatcgaaaaaacacgatggtggaagtcgataagaatccggctaaccacaaatccagccgtgaggtttgagatgatgcgttcaatccattgttcggttgttatatcccactgagggactggcggcaacattccacttttctcttgctccaatgcctgttgcaacgcaagagtagcaaagacatccagagctagatattgccaaacagcaatggctatctggcgaaccaaaaagcaaccccgaggaggcgtgttcataccacgtcgtttataatacgctggctgtggtggggcattttttatttgccagggcgtgttgatcccacgaggatcagtgaagagccgagctgcggcgtaaatttgagccacaaagccctggccagctccagaagacaaatcattgctatctttggggttgatgagtagcaggttcaggcattggaagatgatggtcacaaataggcgagcgagttcacaccatacaaatcccggacctagcgctgtggccaccggtatagctcgatatacaatgaagatagagcatggaatcgacagataccgaagagcagactgctttggtgttgcgattaggagggccacgggtataaggcaatgggcggcatagagaaagagaatttgcagaatgttggaagaggttgacatggcccgcttatccccaagcaaaaggggaaacgcctttgaacgagtgttgatgttgcgagagatgtgattttctccagaaaggggcgatcctttcttattcttcgtaggatctgcagagaatctcaatattgagctgcgtgggccctttacggcgagcgataaatacggaggcgacaaaatatatccatcttgtttcagatcgtgaaattgatgctcttctcaataactatttgtatcttgtttcatacttagaataatatagccaacttaggcgtatcataccgtcactacagactttccacgccactaatgtatagatcgcatctgcaaagtatgttacagcacatgtcacgatctatgagatgatgatcggtcaggttttttccgtccacaccaccaaacatagggctttcccagcctacaagggtctcgcatatgtttaccacttcctccacatagtgatgcttccaagcgtcgtctagagtaggccaggcaactgcaagtgtccgaccaggtactcgagtcataaagagataagaccgggtattatccttagtctcgtgtataacacgagggatcttaaagtaggcttctgaccatggacaaaagctaacgtagtagcctcggacgttgcgccttcttcaagcgtcttaacctaacaaaatacatcattagctatcgaagaacgttctgcaacgtcatatacgaggacgatcctcgggttatctgtaggtagtggaacggtcggaggtagagggacaggcgcgttggtaagagtatagctaagattatcggtcgagtcataccaagaagagacatcggaaggaccgctcgaagaatggaggatcaggtcaccaataagccatgtattctcatctacctgcttgatagactccctaacagggtctgccatggtctttgagctagggcaaatggtatcaaataacttgtaaaatggtggatcacgacagtttgagaaaaacaatagatggaagaccgtaaatagctgggggggggggagataaatacgggcggaatgtaaacaaagggccttgccgtatacatagatacctaggcggtacaaggataatataccgtggagctatgagtgagttaatagaacagatgatgttggctgtggtaatgataatatagggaagtattggtagatatgaagtcccattctgttcaactgtcctaaaattctcattgggatatatcaagcgcagaagtaccaaaatactatgccttcaaagcgatgctagtcgaggtgaaaatgatcaagcagaatgagggccagagtcgataataatagtcgatgctcgccacgttttaccgcgcggaattgatagcaagagcgcgacacgatcgtgtgcgggaaagagggaccgggtatatgttgtttcgatctctgataaggggattcactagtatacccctctcttggagattataatctccagactggtgatttagtagacaacttgtcttatcaaagtttctataaattgaaagacggcaaattcccgacatcaatattctccgctcatatcacagttatataaaccgacatcctagggaattccgaacaactatcaatccccaaatatggacacagctctcaacgacgccgtggctcgatttatcgagcgccaccctgaatcgcaacgcctgcataagctctcactcgaaagcttaccgggaggaaatacccgcactgtgctgcacacagcaccatacccagtgttcatgcgcaaaggctcaggctcggaattgtgggatgaagatggaaacaagtaaatacatcgatctgagcctctagaatgtgtagactaacaccaatttcccagatattatgacttcgtcggcgagttatccgccgggctatatggacactctcacccgacgctgcaaaaggtgttgacagataccattcagaacgtcgggctgagtctgggagcgacgaatgtctacgagcagcgatatgcctcgttgctgtgtgagaggtttggacttgaacggattcgattcacaaactccggaacagaagcgaatatacactgtcttgctgccgctaggaaattcaccggccggcgtaaggtcatcgtcttccgcggtgcctatcatggtagcgtgctgttctttggagacggtatcccggaaaacgacatcgaccaggctgattgggtactactgcaatacaatgatcccgagggtgtccgggaagcgttttcccagaacaatgacattgccgccgttctcctggaggggattcaggggtctagcgggtacatttctgcatccgacgagttcctacgaacaatccgcgaggagagcgagaaagcgggcgcggtaatgattctggatgaggtgatgacatctcggctggcaccgggagggctgaaagatgtgctcgggattaaaccggatcttatcactttgggcaagtatctgggtggaggtctgccattcggggctttcggtggccgacgagacattatggatgtttacaaccctctcacgcccggggctttgatgcactctggcacattccagaataacactctgatgttgcacgctgggtatgcgggactctctgaagtgtatacggctgaagttgttcaatcgctcaatactcaaggcgatgacttgcgtgagcgcttgcagcgggtctttgctggatctaagttctgcgttactgggcggggttctcttatgtgcgttcatgccactaatacgggagttcgcgcggagcagatcacttgtcgagatgattttattggggttgaggctacggatctcaagcagctgttctggttggaactggtgaatgcagggttctgggtgcagaatcgaggatcaattaccttgaacatcgctatgactaccaccgctctcgatgcgtttgttgaagccgtcgaggagttttgcaagagatataaatccttggttatggcttagtatatgtgttatcactacagtgggttcaaaatatggagaaactagatgttcgaagaagtatttagatgtgaatctatatgagaatgtgcaacacaatgcattgcacattagacataacactgcatacctgagtggcgagttttcgatgtaactgcaacagctcagagacaaaggccacgaggttcaagatggaaaagtatataaaagcaaggacagtaagactcaatcgtgcggattctacatagatagtcgtgccgcgtcattatgaacacaaataagaaaaaaacagaaacctgacagttagtccgtcatataatagggaaggttcactcgctcaggaacaacgccatagaaatatatgaccagagtaaaaaagaaaaaaaaggatggcctaaatgcccacttccacagccggctgtgtatagcgagctttcgcaaattcaaagcagtccgtgacaccttgccaaatcccgggaacgtagtttcggctccaggcgcaaataacgagaataagaagagggatctgtagaaatggtgttagctgagtactactcaagaaaagaagccggtggacatgttggttacttacccagatgaagtataggtttcggtcgctgcctagacccttcattcgtcgagcctgttgctctcggagatgcttttgttgctcacgtgagatcacattgcgtccaattgtgatgtctttgatatcgtcattctcgacttgagcgagagaagttgaagctgaggccgaagcggcggccgccgcggcacggcagtnnnnnnnnnnnnnnnnnnnnnnnnnnnnnnnnnnnnnnnnnnnnnnnnnnnnnnnnnnnnnnnnnnnnnnnnnnnnnnnnnnnnnnnnnnnnnnnnnnnnnnnnnnnnnnnnnnnnnnnnnnnnnnnnnnnnnnnnnnnnnnnnnnnnnnnnnnnnnnnnnnnnnnnnnnnnnnnnnnnnnnnnnnnnnnnnnnnnnnnnnnnnnnnnnnnnnnggggagggggcggccgccgcagcagcactgctctgggcctcgaagtgttggtcgatagctgcctctgttgcggcacggagcagactcgacttcttcatgtcggactcatcggtggcatcggggtccgggaacagctcatcgtatgaaggtggctgattgggattgggtgcagaggtgcccttcaagtaatcccaccagccatcccgagcagcaggccgatgagggacaaggttggttatgcggcgcatcattccttgcccttggtagtcttggagggcgggcatcgcgggcattgcgggtatcgcaggcatcggaggcattggagggagagccgggagattggggaaggcattagccacgctctgctggaattgattgatttgaagagccagctggtcacgccacgccacaagaggtgctggtggggcgtagccttgagcatctccggatgcgacggtttgttcgttattatccataattggcggactaatatcttggtgcatactagaccgacgagaagagctgaattgaagaggctccgagtcggaatcagtagtttcctcctcatcatcgaaatcctctgagtcatcaacagcatgatcaagagatccagaggcggaagacgcctcccacatcgagctaagcgaggctgagctgctttgtcggcggcgcgatgtgagggacccaacgctgcgggaccggtagtgacgagatggaagcaatgcggcttggtgcgcgggaagcgtggtcgctaggtccgcggcagtgaagccccgtacgctgcgagtgttggggttggcacccgtcagacgcaatcggtggacgatgtgggcatggccattgagtgcggccagatgcattggcgcattgcctgtgttgtcttgcacatcgggatttgcacctcgagccaaaagacccgccacaaatcttgtcagtcctaacgatgctgcgaagtgaagaaggctttggccggtcgtgctacgagcgttataccgcggtggccggggactgtcatccaagtcgatgaactccaagtaggtcagcatcttggagtcgagatcgccgagcttgccttggttttcaaggcccggtacttggcgttgctgacccccagatgagttaccttgcatttctgactgcatattgaagaacgcgtttggatcgcttcccatgatttgttgggctgtgtggaatgcatccgcttggcttcccaatttctgaccaagaatgttcagtgccaagcgatacatttgaagctcacgatcatccacatagcggaagaacagctgctgtttgggcatgaggggttgagactgttggacttggccaaatgtcgggtgttcatgtttgaataccacagacaccaatcccggttggagagcgggtggggtcaggcagttgaggcacttgtcaccccaaaatgtggttgtagttgccaacgtgtcgccgaaaacaacctccatgccgggataaaatccgctgcccaacaatgtaacctcagtacctcctgtgatagagccctcggctggcaccaacttgtggatcacggatggcaatcgattgagagtattgttgagaggaggccaaagttggcttgaggtattcgcaccaagacccatgggaacatttgaatcatggaagccattgcgattcgagccacctggtgtccccggacgactgggatgggtggagttgggcgttgatgccactgctcccccgaccagggtatccaaactttgtcgctgagcaggtgtcgggttgaagaatggattgttatcattgttctggttgggagtgggagggccatttccatattgacctgacatggcggacggatttacaaacggccgttcagttggtgaagcgaacccacgagcagccgcaagttgcgcagcgttgttcatggccgctgcggatgactgaggtgtctcgagtcgtgtcatagtcagttctgatggaagccttccagagctgctatgtttgcgtcgtttgctttgtggtccttggaattcagatggagatgctcctcgagacaaacttctagacgcctgaggcacgtgccctccgttcgttgagcccggagccgcaaatgaactgggcgtaagctgatattgcgaattgaacctttgttgaagaccctgtagatcagttggcgactgaggtgtaccgaaagtattttgcccgttatcgggggtttgacctgagggaaacactccagctcccggtacttgcgtcccatctgggagggatggcgaagggccagtcagtgcaggcgcagatggggcctgcgtcttgtggtcgtccgttatcataatcgaatttgtaattgcctgcgccaccacgttgtccaagtgatccttcacagtgaagataacctggaatccgagcttctcattttggtgtcggcaatagcatgcaatacgcattggcagttccacttgcattgatcctggtgggaccgacgatctatcgccgtagccaccgctggcattctttgcgggttcggtccattccttgatctcgctggtgttgaagacgatcacacgcttctcttcatctttttgaaacaattcatcttcttcgggcttcctttgcttcttccgtgacgcacgtttccgttctcgctgtatacatccactgcagattttgacatcacctccgtccaacggacgttcgtcatccgaagttgtttgatagcgatcaccccttgtccgtgcaaatgcccgcttgatcttttctctgtcttgcatggcacttgtgcatacgagacttgtaaacaattgaagggtatcgcgggtaggctcggtggcaggaggagcaaggaatttgagttttgagatggtgtgagagggaagacggagtttcttgacgccggtaggtagcggggagagggtcaatcggattggaatttgagtctcaacacgggatttgagggaagttggatgcacagtgagaataggttgtagagagtgcgcattattttgaggttgggctggggaggaggcgaagttgacaggaaattggtatgatgtgggcgaggcgaagttcatggcgggtgataacgaggcgtggagaggtgattggcgattcatattgatgcctccgaagctttcttccagaagagacgaaggagactgtccgccccattgcggagcggctctatccatatcgtgaggcattgaggtcgagtatggagattggccgttgagtccaaaagcgaagaacggagacccgggagcatgaccctggattgttagcaacgcgacaaacaagaatattgttcgaatgacttacggaaggcacggcatcaatggatggcagcccagtgtgattgctcgaaggactccagagctgggatttcgcgcgcttttggggcctcgggagtgagccattgtccgtcttcaatggactagggctactcgctgcactttcgaaatcgaaggctgcatccatcgccttgttactgacttccagatcaggatccatggagaaaccatccataggaaaagaaggatcaatattgaagggcgattcctccttgactgacgataattccgggcgcatccaatcctccgacgggtaactagtagagactagaggattttcactatgcgttgcggagttcgtcgaagcgaccgatgtttgtcgtagatgattccgtggcgattcggaggaagaactgcgacccgagtcatctggcgattcggctggcgagtccgcggcaagactcggcacttgcctcagaggattttggttttggtatggctttgaaggccccgaggcgccattcgcacgggatgttgtggctcgagcgaataggtcgtcaaaatctcccccagcattctcagttgacatctcgagttgtgtggggtccaaaaagtccatgtcgtcgtccatgatgataggatccagggcggagaatgagggcgaaaagggtgcctgagctgatatcatgcttcgtttttttcccccgtcttgatgcttgtgaatcgtagtcgatttcaaccgcccaacagccaccttcacgacaattgaatatgacgggcgattcggtcgctaaaaaaggaatctcggagacggtagagatccaaagagtatgacaatcaagtcttgtcggagtttataccaggaccagtctccgataccatggcccttgttgagagagattcgaaggtggtcggggaaagtcactgccttggggttatctggaggaaaggggagcgggaaaactgtgaacgccgatccaggccggcagaatctcgacaaatggaatcaacgattctgcttgaatttatatagtcgtgatgatagaaattaaatggttatagcagttgattgagacacaaatgattctatgttctccatatactttccagctcaaagtaaagccctaaatggcatttgtgcttaaaatagacacctcaggcctcacaaagcggtgaccaatacagtacgcaccatacgcccacccttcccgtatcttccatcgctttgatttgctgaccctacttctcccgtctgacaggggtgtgaggggatctgactctgggttctaagctgttctacagcatgcggaacagtagtccttgagatcttggaagactctgtatgacaaaataacttcttctcgctttgtgatacactttctcccattcctcgggctgaccctggggcccaataattggaacgaaaaaaggacatgtgtacatgcatgacgacgacaacgtaccgggatgccaagcgcacacagacgccattcctcgcaaaggtagagattgtggcacccagttatcggctgtgtcctaccctcgctctgttagagtaacacaccttggtggcctgcagggctagctatcgttttctgtgtgttgcttattggatatcatataaagatgctatgtaggtgacactatgatgcacttatgcttacgatcggcggaatcgccatgccaagggaccaatgagcaatgctgtgctggcatacaaaatataatggtgccaagctcagcagcgtctagggttagcgggctgcagattgtagagattatgtatgttttgtatagtaactatgaacaaaatgtacataaatagtcctggcatcgctttgcttaaccctcccacgacatgtagttcgagacaacacgggaagatatagtgtgaaatgaaatctcagttatctactctctactcctaaaacatatatttagaattaacactagcagtaaatcaactgaatcagactcacattccagaataataaatctttacttttcatttttcctcgagctaggtcatgttacgactaggtaccttttgtatgcagttgctatacaaaaaatacatcgactctataatttgctattcagcaccgacacttcatgagcttggcacaatcatcttacgagagcctccatagacagtggagaatctcttcttctcccacgtgtataatgcggactggttcgattataaggtcttcatcagccaaagatatctgccctagaggcaaagatctacggagtagttcctagcgagcaatcacacggctaagactggctagatctaatcgatcctgctaaggattcacggtcgttgaactaatttaaagatgtttcaacgagatgaattggtcaaaagtctcaatctatttgataatttgcgaggaaccaactccggaataatatgatttctatgtggcttgaacaatttcacgattttggcgcctttgcaatttagatctgacagaagcgttgaatatagaccgttcgagattttcgtcgtgaactcctggaccctattatgcaggagacggacatgatgtggagcgtctcggaataattctaagcgctggggtctagggatcatatgtaggggttcaaatgaagccttctggatttttaagaaaaagccgttgaggttggccatttatatagggaaattttccaacttactccgtgtttcaacaccgtagtctatagacaatcgacctgtccgaagtcattgtgggataccgaattctccgggtttcccctgaagcggaattaaacaaggtctatctctccgaaacaggagaaaaacccttacaggctggaaagagcggagatgttatcacttcaaggggttcgatgaaacttggactgtcacagacaaccgcccacgatcgacagccaccaaagatatgagacaatatcaaacgtcccctccttgatgatcccaatggagtatagctcaacaagggttatgcactagtgcagccggcggtttacggagtaaagtccatgcttcatctatatggcacatcctagatgtctcggtcgctaattctccacctataggcacatccacaaagtggaatcattgttccctgctagaaacttccggacttgatgatatccgctgcgatatggatttcttggcaacggagtgatgccgcttctgtcgaatgggagctatcatgtcaggaccctacatatataaggccctggcatccgggctactggatttttttctcatccatcctttgcattccattcatttcaaggtctagtaccattcattcgttctctttttgggttgacttcattgactgaagtccccttttcattctttttcgctcacctttgatacttcgatccttcgatctaaacgctgtgcgttttattctacaactttttcaagatgtctgtctcaaagattgcgggtctcctgcttagctcggccgccatggtcgctggtcacggtttcgtgtcgggtgccgttgttgatggcacttaccacgggggcttcatcgtcaatacatacaactacatgaccgaggtgcctgcgaacattggatggagtgaaaaggccaccgacctcggctacatcgacggctctggctacactggctccgacattatttgccacaaggaagccactccgggtgcgatctccgccgaggtcaaggccggtggctctgtcgagctgcagtggactgactggcccgagagccaccacggcccggtcattacctacatggctaactgcaatggcgactgctccgtggtcgacaagacaaccctcaagtttttcaagatcgccgaggccggtctgatcgacgacactaacgtccccggtacatgggcaagtgaccaactcattgctgccaacaacagcgccactgtgactatccccagcaccatcgccgctggtaactatgttctccgtcacgagatcattgccctgcactccgccggcgatgcaaacggcgcccaaaactacccccagtgtatcaacctgaaggtcaccggcggcggcagcgactcccctgacggcgtcctcggcacagcgctctacacgcccaccgatcccggtattttgatcagcatctacagcgcactggagtcctatgtgatccccggccccgctttgtacaccggcgcttcatccggctcttcatcgacctcctcgaccaccgccgcagccactaccgaagccactaccgcgtctgctactgtttctaccaccgcggcccccaccgtggctactaccagtgcctcaaccgtgagtgcctctcctatccagagctcctcttcgcaccacctcacccgcacccgcacccgcactgcccgtcctacgtacagccctactttctcgtctgctcccacgtctgctgtctcaacttccgcccctagtgggccagattatgagcccactgatgctccttccaccctcatcgagaatgcgactgccaccgcttcctctgctcctcaggttactgacgagcctgctacacagaccgccagcaccgccgacagcatcaccatcaccaccaccgccggtggtctgtctgcccagagctccgcagccgtcctcgagtctagcgccacttccactgtcactgccgaggctactgctactgctgcccctaccgccgcagccaccacttccacctctagcaccagctctggatcttcttcctccagctccacctccagctccggatcttcttccactagctccacctctacctccaactcctcgtacctcagctccctgagcgccgagaagctcctcgaggtcatccggtcgaccctgaagtggcttgtctctgacaagaaggtgcacgcccgtgctctagcttactaaaatattcgccctacatgctataactatttatagctgtgtgatgtgaaacttgttactgaacatctgtgaaactggatcgggtatcctctgtctctattgattgttctgttcggactgattgtaacaacaccgtgttacggatttcctttatattctctttcctccttgcgttttgcgcatagagacgataggcctgctttggtcttttatttttctactttacctttatgaatggaatcgctggactgctcaattttgtgatctcgtagataaaagcgtaattcttgagaccgtttctaccttgggttgataggacctgattttttgatcctcccttcttcccctctttctctctttctctctcttcctctctctcttagccagctggtttcctttcctatcggtaacataagattatacaagcactacatagatagccctttgacgatgccatatatcaacatgcagcagtttccaaggtaccacctaatacaaagatgcaaataacttaaatcaagttaagtcccagctttctggggtaagaaaaatggcctatatcagtatattaacagaataggacaagcaacgaagaggtcagtgggaaaaaaagaaatagtcctgggacccggaatcgaaccaggatctacgagcttcgaaaagcataggtatgtgtacttaagacacaagcctacccgtcggggcgccgtgctaccattgcaccatcctagggttaggttgggggtaaggagattgagagagtgaagacaagagaagtgtgttgtccgtggacggaaagggagaatgcaagcttcgtcatgctggagggaaatcatatgtaggaatggagtcaacaatctgacaactctatgttagaagatatagggcaagagtaacacagcggtcgatcacctggcataaagtatgtatcttgactagtactagtatcatgtttgacttcgttcatttccatggtatgcttctactaagtttagtctacctggggctatttgcctatgccatgaagttgacctccccgtcggactatattcatcaagtcccacggggaatcccatggtctagtaaaagctagtaccctaaggaccgttaaaatatatcttcagctccgacttatgaagtatctcaatcttccgaaactttaccattgtatacacctaagatcaggtaaatgagattaccgtcatctcaaggcaaatccctcgaggtaaggcaaatccttagtgattagggggctgaaagtacttgccaatctctaatccagtgttctagacaataacatactactctggagtataggaagcaagcttataactgcttttagatcccgggtctcaggactcgctcatccattcctatcctatgtcttcactcgtcccctatacttgccaccaaatatacctggggtggtgcaatggcagcacggcgccctgacgggtgggcttgcatcttaagtatacatacccatgcttttcgaagctcgtagatcctggttcgattctgggtcccaggactattcctttttttttccttacagaatgtcgattccatactcctatttctgatatttgtctatgcactttatcctatgtctcattggtggtacgagcgaaagctaacagttattatcatttcctactttttgagtatgtggatacagatatatatgtcagaagaatatcagcctaggcgaggatacatagtcgtggggaaaaaaagggaaataatcgtttaatatatgtctcgtgcttattatttagtatcctgtttttcacataaaaaatggtagtctctgtatgggatttagacttgatgtgatgattctaggagaaaaaaatgtagaatatgcagaatcctttctatatcgacaagacacctcgttatcaacaaatcagcccggctagctcaattggcagagcgtgtgacttttaactcactagcaatttatctcagatatctgttagcacttgaaatcacaaggttcggggttcgaccccccggtcgggcaacattaaagttgcccactgctcatcttttttgtatctaatacaccaagatattcatttttgttctgttttctcactttgccgttaactatacttcctccttgtagcaagttgaagtgattgtgtggatatacttattcctcatcggcaaattccaggcgccactaaaaatactatctaggtagtacgatatttatccaaggccttatatactccgtatcattgccaagtttaccagataaaggacatttacgaggtctacagccttggcaggacatctcagtctggtgcctagccctgaagaccagatatatgggaggcggttgatactgatatcaatgatacggagacacggcgagatagcagacacgggaacgggagtggcaatggaaggcaaggcggcgagaggggaattgaaattgtcgaatggaacgggggagaaccatggagaggaattgaagcaacagagtgatggtcaattgaatcttgggttgaagaatagttcttttgttttggggggatttatggcggtgggttggggaatatgtatctgagaaggtagttgcccatctcaccatgtatgtttcatctctagcggtatgcgctgatttattgtttgtacagaaaaagtgctctctatctagtggtatggacagacaatcatttaatcgtcgatcatttcttcttcttggtcttatccacaacctcaatcatctgtgacttcaatccacggcgaaccagggctgtctcaatggcctttcgctggtcgccctgcaccaaaacttccatgatccccttgggggcaccagtagcttgtgtgacactagtgctaccggcacacttcttctgcagctcctgtgccaacagactaggaataatgccgaagacctccaaagtcataactttggtaacggtcttggagcctgtccgcttctcgagggtgacatggaccttcggtgcggggcctgctttcggcttgacgtctgcaagagtttgattggtcttcaaaatgacatggtacggcgaaagcagtgttttatcatccatgagtcgtttaagaagaccatcgcgagtggccttgccacgtgccagtgtccccttatcttcggttgatgatgaattgaagatggtgttcgcgaggaatgggttgagggttatgatgcgcttgttctcttttgagatgatcggggggttttgggattcaagatattgatccaagtgactggaaacttcggagtatttgtagaagttatttgtgtcgctggcagcgagggcagggaaaatggttggcactagctttcctgatggccgatatagactctgcacagtgatcgtttggcccactgaagggtcggagccatccagcgcagccgactttttgccctcgggtgcggtcgccttgttgttctccagagcacgcggtgaaggcaatctgtatggcacaaatcgctcaacccgatggtcctcaaagtccacatcccaaataacggtctcttgaccattacgttccttggttttgacaagcttcgatttgtctagatgtttcatgaacttctttacgttcttccaactggttttcttgatgttgtaatgctgagcctgctgaggtgtgtgcacaggaagataaggagcagtgaagttggctatcaatgccgaagctgtgattggcagtggaaggccatggtctgctgcggacggattatcctgcttgtgcttgtagagggcgtagacaaaagcattgacgaatgcgtcgtcgatttctattatttgtcagtgtttgattgatttgagttgggaaaccaactgctggctgataaagagaaaggtaggggtgactcaccctctgttgggggtgcatcgacctcgatgacgggttcttctgatatccttgggtcattgcttagtgtttcaatgtcccccgaggcagctgtcggctcatcatcctcaattttcaattcctccatttgttcttcaacaccctcggtttcatcctcgtcccagccctccaagtactctggagctgcacggcccggcagtgacgcagagctccacgcccaaagttcatcaccctcccaatgcaatccacggacggcatggccctttgtgccttgcacctctcccaatgccgaaacatcaatctcacagacgcccacaaaaagtggcactgtatgtcggtctacactcgcgaccgcaacaacggcgcccttgaccgccctttcagggaacggaggttcattcgcaaggcccggcgtcattaaatcagctccaccatggagctttcccatcacaaactccggagtatagagtaacggaaccaagttcgggttgtgccatagtgtatagacagttgggaatagtcggttttcggcccccgggccgtgttccagcttgaaccatagcacccgctcatcgccgtcgggatgtgtcccaacatatacgaccccttgaagttcgcgtaggtctggaccagcagtggttgtaaaacgagcggtttgagtgttatcgggcaggagggcattccggatcgttgtgaggctcaatgcgggggcagatgcggtgctgggcccagacgagtctgctttggtgggggccgaggtgacggggatttggtaatctttgataatttggtcggcaatcttcctacggtcagaagaccgtagtggagaaagatttttgatctggtctatatgagcagagagtcctttgcggtgggagggttggaaacccaaagcttggaggggcagtgcggggagagaggtcgtttaccgtaggcttctttttgaacataattgtaatctcaaagctcgaagcttaaagtgcaaagtgtaattgaatccacacaggtcagccgaagacgagagggagaagatgtcaagagtaaagatgtgacgtccgatcaaagaatctcccggagatctccacatggcccgaagaggaaaagaactcgttttcttagcatccgtggaattcgcgacaacgccagtctgactcaaccactttatcaatgcctaattaatccattcttccacgtaatctctcccaactttacagtaaagctggcacagaaaggctgaattttgatggaatgggcaagatggttcaatattaggccaagctggtagctaggctagtccctcacagttgagaaacagggtattgctatggtgagaagcattgttgaggtatttatccaaaaggctagagattacatcgaagaaggcagagatataggtacaagcaatgaatcctcaaagctagaaggaagaaagtcccaagtggtcaaaaataactccggacagatgaagaatagcgttattaaatcgaacgaggcatcgtaaaatagtagattgagacatgaagtcaatcgtccgattgtctcggtattggtttgactggtcttctcgatgggcccattccttgggaaaccacaacccagaagcgccagtatgtgcgtcattgaacaaatggtgctgcatgcaggccatggaatagtattatgtatatggtgcaatttccggaacatatccggctgcattcacctcaccccttggtaggtgcctcactggagtctagcctcaagctcgcatcctctgcttctagctgaatccatcacatcatccgagagaacttcaagatgttttcggttcatcgggactatacttccagcgtcggaagttatctgcaatccaccactgcgacacatgggcggcctcgctaagccacctcgcggcttcgggcccgtgccgtgtctggacggcatcaaacaaggacacgatgtcggtgtcttcctcgggactgaactcgagtgggtcggcgacgacattggtgaatcgccacggggcatcggggataagcggcacgacaagacggtacggtttcccggctgctcgcatagagacccacgttcctccagggttcatcgtggagaagtgccattctgacttcttatcctgctcggatataagtgggcgtagcaacgactggccttcgtatataggaagcaggtccttcagtatatgtgccgactgttcgttgatattggaggtttcgattagaatatcgaggatactggggagcatttgagtcgaaaggacggcgccactgatttcgatcgggggtagcttaggatgggcgaggagtaggggaacgtggaaactgccgacgtgggggtcatggttggccgttataccaccatcatttggaagagataaaccgctataatcgagttaatgaaaggttgatagggtctaagaaaaaagacaacttactggtctcctgccatgacaagcagggtttcatcaccgaccccagcctcttcgagaatctcaaggatagaggctagccagttgtcctgatacttgatagtattgaggtaccggttcaagttatcgttccatccaatgccattcccgaagaatttctcgtattcaccaggcttaaaccaaggagtatgggtattgtgagttaggtgaccgataaagaggcgagtattattcttcttagcttcggcaaatgcgtcccgcatatagttctttagtgtatgatccgggtgaccatatttctgctcttcctctggctcctctggtatgtatatagcgccggcttcattgattgattctttggttgtgatatctttgaatcccatgacaggagtaagatcctcctggtggtcccaggtaccataatgggactgcatccacttagaatgccacggccaggaggtccaatcctcagtatcactagtgatatttgattgttggctcaaagcgtggaatatgtgcggtaggcaaggctgataaatatcatgcaggtactcaagattaccttggacaggcatagggctcacaccgcacatagtgcctgtaatacttttcatggtgtatgtaccggatgtataagcatttttcgcgctgaggccaccatagggctttggacgatccttattctctttgaaaccagtctcaaatccggtgaacatttgggcgataggggtgagattggagagtttatccataacttcctcagggacatttccatcccaagactttttcaggtgctccatgatgtaagagtcggagcggaagggaaagacgtcctgccgattgctttctaatttgatgagaataatatgtttgatcttgacgtctccgctgtgaagcacgtcacgtataggctccagaatttcgttctggagattgggaaagtgtagcggatctttcaacgggttgtagtgttcgtacaaatactcgttaggtgcggtattgttgaagtgacttatgcggaagggagaccagtccgggaaggcagtcgctgcatcacccgtatgtaaccaatcgaatgtcgggaaggagtccagagtatttttgtcttctagccagcggaaatcgcccggtaacgacaccacacctcgttgagaggacccgaacctgaggccgccaaaaggtgcgagaggcagagatgcggagaggaaactgtaagtcatatcgtggggacgaacgacacggaggaaaagtagaattgcgctgcacgatacgacaatagcgggcttgagcaatgcctgactcttccgtacaggcgggtctcggggcgcatctagcaacgataaggagtcgctgtcatcaccgagttcataatcatcgattgcgatttcttcataggtatctgggtgtggcagagcttgcttattcggacggaagtagcgataggtcgcggaaattactgcagcccagaccctcaggaaggctgcagtgacccgggatagatacggtgtggcgtagaatgcgcctaccaaaatcgacgtctcgagcaggatagcgacgaacagggctgacaaaacaagcgtggcggcgggcttgtccttgtggaagccactcgatatgcgccagtggatctccatgcccttgtggatataaaaggagatgttggcggaaatcattgacgaggcatatagactgggatggttagcgattcattcgctgtgtgaatccgagaaaggcctacctgaatagcgcagtgaatacggctgctatatcccgagtcgttcgccattcgtacgatcgggcgagactgcgcgcgcccagaatgagcaggatatccagcaaaaagaaggtgggaccccaggcgagaagggacaggaccgacagcgcattgagatgggcgtagatatggaaagccttggaaagcacgagggagatgaaaatgaccgaaaagaaatatgcgcgcgaggctgcccagccacgattaagatggtcctgaggtgatctggcgatttcgagggcgacgatggctgcagattcaagcttcccacgcagccgctgggaaagaccctctttcagctcccagggaggtctcatgatatatgtacaaaaaaagaaaactgcaatgcgtcaaatcatacaagaacgttgcacctgaattaactaaaggacagaattttccccatggatgtaatggaagaggtgtaggagaagaatccgataaggattttagaaataaggagagaccttcaagcagagagggtccggtccactttccacacgcctagaataatatccgacatctttgggaggcaaagatcagcaatgcctatcatcgtagggctattccgccgccaagactcccaaaatagcaagtaagcacgcgatggaaatatctgtacggagtacggagtatctcaggttgataacaaacaggggagacggggacaggtgccagttgtaaactgcctatttgggactaccgagctatttacaatggccatagcatatacggaatactatcccacgatattgcctatgttttacaacatagcaacatttggtctttcaaacttgctcaaggcgtttgtggagatcgccttggcaaagccacgtacgtggccccgtagcgatgaaccttgaacccgttagaattctcctggagctccacatctaccccattggcggttaaccttggaatctgatgctggagcttccaaggttgtcattatgttgtacaacataagtattgtaacatcaaagataactaagcactgttgttagtgaacctcgtgggatcggtcttatcactatctcatcccattcagctgaaggatgcacgatgagatttggtatagatcaggtggtggagcataacagtaagattaccattttagccacatgaaagctgcaaaggtaaagctgttcaaaaaataccacaaacatctaatagcaaaagtcaactcgttgggtttagggctaataaaacaaatagtatatcacccgaggaagccacagcctatgggctgtgttgcgatgccaataaggcaaagaaaattaaaagaggtcaccacaagaaacataaagtgacattggagcgtaggtaggatcatagtacagggcccgaaggatatatagttgaacttcagggttccgcatcaaggtttgtccacaggtaactggtgctgtgctgttcagtgccagcacgtataaatctcgatgatagagaaattaataaatcatggggaacacaatacaacatagggctgctattatgatcggcggtagggtaaagtctaatgagtaggcaggtgaaattggtgcctggtgtaggaggtagaagattccaaggacaaaaatagttatacttaggctatatagttaccacaatatgcaagactaatcatcagcaagagggatccccaatgggtccagagtccactgttgccatcaagagctatatcatcgcatacgatatccataccaaggcatcggacatcccccgagaaccccaccggcaccccgccgagcataaagagacaattaccggatgcactaaacctgggtaaagtacatctacccttgttagtgaagaatcagccaaaatgccagtctatcacatcggtgagttggatgcaggtatccaaaggatacgaaacatcactaaccaagctccaagtcctcttccgtctcaaatctggtgtcaccccggcccagatcgcgacctggaaggagacatgccagggaatggtggggaagattcccggtacgtgaaattctgaagttcagatcgagacagtttctcatgtaaatcctcacaataggactgctgtcgctgcagaacggtcccccgctgccaatttcgattccccgcgcccacggcttcgatatgggacttgttgctgttttggagacgcctgagcatgtggctacctatgcggtacaccctgctcacttggagtaagtcttcttcgtcgtcggattagtgaggaccgtggctcatttgctgacaccttggagggttcataaaatgcgcgaggagttgtgcgatgatactttggcctatgatctagagttctaggcgtttgatgtagtactaggtttcccataaagcgaagaaagttgcgaacagtccgttcaaaagtctcatttgtacatatcaaaccctaggtaggccccgttaatcgtagccactggggcctgcctagccaacccgtagatgctcgtaatgaaatgacaataacgccgatagaaggttcacctctatgaaataatcggaaaatagaggcaggtgggatctccaatccgcaatactttttgaatcccgctgattgaccgaatcagagaacaagaattaaagacaagacatttcaatccgccgaaactggataccttattccttggcatccaccttcttggcagggtggtcaccgctggtgccctcgtcctcacgggagcgcttctgggtgctctgcacgaccgggacaccactagaattgaagtcagcacttatacactcactgcgaatatcagatcactatgacttaccgggagtccttctgggcctcacggggagcctggaagccattctgttggtcctcagtgcggcgttcgcgccagtcacgaccaccatcacggtcattgcggtcacggccgccacggccacggctaccaccacgaccacgaccgccgcgaccaccacggccaccacgtccaccacggctaccaccacggccgccgctgttgcgagcgttggaggggtagacgttgccattcttgatctcctcgaccttctcgtcgcagtactccttcttgctcttgaagatcaggtcattctccttccactgaggcttcttctccagagcgaggaatgccttttgcttctcctcggactcaaactcaacaaagatgctgcccttgaaggtcttgtcgttagtgcggcgcagacggatggcgtttgtaggaccgtagggagcgaaaagagcctcgatgtcgagctgtgtagtgggttcttcctcgccaaagccgaagcccttggcgtagatggagcgggccatggaggcatcctcgaagaccttaacggccttggcgtcgtgctcgtttacggactcgggcagagggaccttgcgcttgacggcagtgtcgttctcggtgagttcgacgttctcggcggtcttgagggcctcgacaattgccttgaaaggttggaagcggcgcatgcgcttgaaagagtgaaggagttcaagggggacggcgttgttggcgctgccgccaaccttggagagcaggaacttgtccattgggaggttagaatcggaaaagtagaattcgacctacggtatgcgcgtcagttaagatctagtgaaggagcgtttcaaatggtcatacctgcttgcggatctgcacagggtcgtcggttacctctagggtggagggatcaaacttggcgttgttctggcgagggccacggccaccgcggccatcgcgctggaagctgcgggtctcgcgcttctcagtctggggctctgtggacttctcctcggccttctcagacttctctccgagcttagcggcttcggcgacaatacgggcctcatcggcatcctgagcaggcttctcggaggtgccttcctccttcagctcggcgagaacattctgaacatccttctcagcctcggcgttgacaacgggggtcttctgttcttcggtcatagtcgcgaattgtatgtggagactatttcagatggcaaaaaaaagatgataagcaggaagtttcgacgcgacggaaatgggtcaaagaaagcagaaagtgagcaaggggtcgaagggaatttatagccaatctcgggacatagggcacaatacctttatgggttgatcaatgcgctattcagaaaactattgcgcttgtgacaatatcgcggcggggagaatctgggaattttttttgagctccattggcgcctgaggcaggaactagtctgcaattggctagcgtggactcgaactattccctttttggcaattcaacgttctctatacattgtcttctattgtcttcattgtatgcaggaaaaaatggaataacaagagatgaataggagtagaaacaaagttctcgaagggaagtattgatttgactcatagtaactacattatgtactcatatttcgtcaagagcgtcaaagtcagatcgcaccttcccgaaggccaaggtgatttattgatatgctgactccctttcccgggggtttcgaacccatattgtcatggagaattctctcttgtcaaatatcacatatatcttcagttgaatattatttcctggtcgatgataatccgggtaccccgttcaccgcaggatagtaacattatcaggccctgagttgtaagtagcgtctgtcaacccccggattcccattatgttaacaaacgggatatatggtagttgttctccacatacaataccaccggacccttcacttgaagtgctgttttcaatattcaacaggctacaaagcaggttcgccaaatcaaaatggtaccatcacaaagggtttcgtgggttgagggaacctggccgaccaaagatgtattcctcccttctcctgggctcgagatgccatcctgatcatcctcaacagatagtatacctttcaatcgtcggtccattgatgcttgcagctctgttcgagtggtttctctggctcagcgccttcatatactgcctgatcaaggtgtggatgaaagcagaccattggactataagagttctcgctgtggttatgatcttcttctttacagtgatacggtaggttttttggacttcgggacctcattacctagtaatttcattcagggacatccactgacgaatacatagactggcattcctcccagtcatgctcgtgacactgccgttaccaccacaaatcacagttgacttaccccacaagatagtgcatgggtttcaaatgttcgcattctgggccttttctgttcttctgatcggcccatggctattctgtgtttacggtctcactaccaattcattaggcaggaaaaagaggattaagcgagtgcttgatgaccggacagccccgaagactgtggttgtgatgccagtatacaaggaggacccaagtgtcttgatcaaagccatcaactccgtggttgactgcgactaccctgcaaattgcatccatgtcttcctttcatacgatggtggcaaggtggacgagccgtatctccgggtcctcgaccatctcggtattccgatcacactagagagctatcctcagagcatcgactgcatttacaagggtgcacggatcacggtatctcgcttcaaacatggcggtaagaggcattgccagaagcatactttcaagcttatcgacaaggtttatgctgagtatttgaagacacatgacaatctgttcgttctgttcatcgattccgactgcattcttgatcgagtctgcttgcaaaacttcatgtacgacatggaacttaagccaggcagcaatcacgatatgcttgcgatgacaggcatcattacgtcgacgacggagaaaaacagcttgctgacaattcttcaagacatggaatacgtccatggtcagctttttgaacgatccgttgagtctggctgtggtgcggtgacttgtctccctggcgctttgactattctacgcttctcggcttttcgcaagatggccaagtattacttttcggacaaggctgagcaatgcgacgatctcttcgactacgggaaatgtcatctcggggaagaccgatggctcactcacctgttcatgattggtgccacggagcggtatcaaatccagctatgtatgagcgctttctgtaagaccgaagccgtccagacctttagtacgctcttgaagcaacgccgaagatggtttttaggtttcatcaccaacgaggtttgcatgctcactgacgccaggctctggaagcggtatcctcttctgtgtctggttcgattcatgcaaaacacggtccgaacgaccgcactgctctttttcatcatgatcatcgcactccttacaacctcaaaaaaggtggaggatcttcctgtgggattcatgggggtctctttggggttaaactatttactcatgctatactttggcctgcgtctcggacgctataaagcctggctttacccactcatgttcattgtgaacccgttcctcaactggatttatatggtctatggtattttcacagcgggccagcgaacttggggtggaccacgggccgatgctgccactgctgatgaccataccacgccaggagaagcagttgaacaggcaaaggagcagggcgatgagttcaacgttgatgtcgatacgttccgcaccagccttgtgcgacagagatctgttcccatccgcccatcggagaatgtggaaggtcgatttgcacctgccaagcagctgcttgataggtttgatgtcaatactgggcccgcgctcgcgcggatggtcggcgcgatgggaacttccgagaattcccagtaccagttaccttctctctttcgccattcaactgactctgtgctcagtgcatcgtcggattgcggctctagctcggttgctacaccacagaacgtggaaaacctcctgatgagtgaagaagaccagaagaagccctatcattctcgccaaggccaggcatcaacgagctcggtgagcctggatagccaaaatttggagaaccgcttgaatgatgctcttccggctttggtttctgcatccgagcatgataacctaggactcacccacccaccaggagcataccagcctggacgttttgaaaatatgcctccagcctacacagatcccgaaccaacggtgccgaacaaattggcagcgaaatgacctcaaatctcgtgacccacctcatgatattattgtctaacaagaacatacgttgagggtgcatgacgtcagtattcttcattttcttctttcttcctcttttttttcgtctcagcatcatcatagcttttcgaccacactattcttatgttttccagcgcaattttgttttgtctcacttctatagcttttagcatccaaaacacatcccagtctcatatgatgtaaccaccgatccaccgtagacgatcgatttttattctgccggccgcggtgggcggtgaaagtgggtagtctagcaatcgctagaagattcgatgagataccagaagagtccgaacgcccagtaaggtatatagaccagtaggagagagggaaatagagaatgaaagcactttctgacacattttacgttatccgtttataccccaaatttgaaattctttagttcggcgcctaaagagcagccagaccgcttgacacttgtcatcgcccctccaataatagtggagtggcgtgcaaattctcccctccgacttctctcacttttcctccttttgaatctcccatctccctccacctctctatctcctatatccccctactttcttccataatgagtgtcgtcggtatagatttgggtgcgcaaagcaccaaaattggtgttgcccgcaacaagggcattgacattgtgcgtattaccccacggtcttgatctggactcgcggtcttcttaggatgaaacatgacctcacaaattcgagaatttgcgctaactgcttgttgttgacattatagattgccaatgaagtctccaaccgtcagaccccgtatgtccccaaattccccgctatccactaaataactgacgactgatttgaattgttatagctccgtcgttggattcactcctcgcagccgaaacctcggcgaggccgccaaaggtgcagagatctcgaaccttaagaacaccgttggctccctcaagcgcctgatcggccgttctttcaacgatcccgatattgccatcgagcaggaatacaacacatgcaaactggtcgacgtcaatggccaggccggtgtcgaggtcaactaccttggcaagaaggagaagttcacagcaacccagttggtcgctgcgtacctttccaagatcaaggacatcaccgccaaggaattgcgcactcccgtctccgacgtcaccgtcagcgttcctgcttggttcactgacgttcagcgtcgggctatgattgacgctggtgatatcgctggtctcaacatccttcgtctcatcaatgacaccaccgctaccgctcttggctggggtattaccaaattagatctccccggccccgaggagaagccccgccgtgttatgttcgtcgacattggttactccgattacactgcctctattgttgagttccgcaagggtgaactgaacgtcaaggctaccgcctacgatcgtcacttcggtggtcgtaacttcgacaaggccctgaccgagcacctcgccgtcgaattcaaggagaagttcaaggtcgacatccacactaacggcaaggcctggacccgtaccttggtcgccgctgagaagctcaagaaggtcctctcggctaacgcccaggcacctttgagcgtcgagtcccttatggatgacgttgacgtccgcgctatgatgaagcgtgaggagctcgagctcctagtcaagcctctccttgatcgcctgaccgctcctctggagcaggcactctccgaggccaagcttcagattgaggacattgaccagattgagatggtcggtggctgcacccgtgtcccctctatcaaggaaaccctcaccaagttcttcggcaagaacctgtccttcaccctgaaccaggacgaggccattgcccgcggttgtgctttcagctgtgctactctctcccctattttccgtgtccgtgacttcgccgttcacgacattgtcaactaccccattgacttcacctgggagcagtcccccgagatcccagatgaggatactagcctcactgtcttcagccgtggcaatgtcatgccttccaccaagatcctcactttctaccgcaagcagcccttcgatctcgaggcccgctactccgacgtcgcggctatgcccggcaaggtcaacccctggattggccgcttctccgtcaagggcgtccaggctgatgccaacaacgacttcatgatctgcaagctcaaggcccgtctcaacctgcacggtatcctcaatgtcgagtccggatactacgtcgaggatattgaggtcgaggagcccattgaggaggagaagaacgaggacgagatggacgaatctaaggatgaggagcccaagaagacccgcaaggttaagaagcaggttcgcaagggtgacctccccatttcctccgccaccggcggcttcgaccaggccaccaaggaggcttggaccgagcgcgaaaacgctatgtacatggaggataagcttgtcgccgagaccgacgagaagaagaatgagctcgaggcctccatctacgagctccgtgacaagattgacggcgtgtactccgagtttgccagcgaggaggagaaggagaagttgaaggccaagctcacgaccaccgaggttagttttgaatcagcatctatcaataactattgtgatcaagcgtactaacacatcaatttaggattggctgtacgaagatggtgaagacaccaccaagtctgtctacgttgccaagatggacgacatccgcttcatcgccggccctatcatccagcgctacaaggagaaggccgaggccgagcgcgacgccgtccgcaaggccgatgaggaagccgccgctcggcgacgcgccgaacttgaggccaagaagaacgctcagggagattccgacatgcaggatgcccccgagggcgaacttgaggagcagtagatgcattcccacgatattggaatgatttgctgatgagttttcttatttttaagggttgggtatggaaaacccaattccaattgcgttttactctgatctagcaggttcgctaccaatttggatcggggtaactcgccgcgttatgacgaaaaggactttttttaaagagatgttccatggacctagagatttcaatcggcttttaatcgttggccacctttttttggccacttttttgttctaatggcaaacggttatgatgtagatcgttcttgttccctggatgtttatgaatagatgaaaatacactcaacgcctttgtcttcattgttgagatcctgtatgaatttgatatcaacatagctcattggcgaagcgacaggtccctatcgtaataaacttggactttatacagcacaccaaccctaggccaacagcctttagtttgcacgtattgtccttttcacagtcgtacatacagtcagcggctgattattcccagcagatatttataggcgtctactatatatatatatcacataacaattgaagtatacggagacacaagcggtgaatctcaaaagccaataggactaaagtccctaatggcgctgacactgcgatactcattgcaccactttctaccccgctctagttaactacagtgtactctgtaattaatacatcaacatgactcgggaaccttgggagcgaccatatataaataaatcacccaaggatatggtgatgcacagatttgtatggcgtgaaaagcttcattttatacaaccacgcagaaccgggcacctgggcagcgtacattgattactatgcacgtgtaatagtaatttaggtattttaagttttctgctggtaaaatacggcatttaggcatcaaatacccccaaatctagggtttgaaccatgatataccgcttcgtaactggccctatcatggctctatgcacctcaaagacggcctgccgcagatacgatagaggtaaggacaatattccacagtagaagcaaacttcttatgacagtcgcatcaagcaaagttaagaatcctacccagcttgccgtttgttattgtgtcagcctttcttattcccctctcctctcacctgttcctctcttgatcttctccctattcttcttcgcctttttgatcagtgatttctcttgcattgcaccagtcctccaagttccagtctatcttgagagatggcgcaagatcaagataagcgaatgatcctccggcttctgcttgaggatttagatgatctcgaaaatagacagaaaggaaaacaaggcacaggaaaggaaacagaccttgaaattgccatctcatgcttgagggaagatattcgggctatgcaaacttccatcgacgacgagatattggcgcttagcacgagtactgcaatcgccactgaccagaagatactcgcgtctcttcttcgcgaggaaagacttgctaatcaggaccaccaattcgctctcgccctgaacaaaggaaccgctaatcgtacgaatgccttggcaaacgatatcgtatcgtcagatgacgatgacgatgccgtttccattgtcatgggggatctcatgggccggatgtctgtgagtggcagatcatctaacaacggggaaggctcatcatacatgcgttcatctcgaggaaccaacttcatgagtgaatgtgcatcctgtcttacaaaggtcgagtctatcgtgttcaagggtgcgtgcggtcacgagttttgcctcgactgcgtaagacagatgttcctcggtgccatcagagacgaggaattatacccgcctcgttgctgcggcaatgtcataccgcctggtgttgctttgaggatccttaactacgaggagcttcgaaatttcagtgaaagagcccttgaatggaccgcaaaagatcgcctctattgcgctgagccaacatgttcgaaattcattcccccattcgctatccgagacgagcacggcacctgccccgaatgtcaccagcggactcatgtaccatgccgttccctcgcccaccctcgcgtcgattgcccaatggacgagactcttcatgctgtattggaaatagcggattctcaaaactggaagcgatgcttcaattgccgaaccatggtagagttgcacgttggctgcaaccatataacatgtcggtaagtgagaaacatcccctacaacaaacaatatcacagtacatgagaagaaactaatgatttgtagctgtggccgcgaattttgctatgtgtgtggcttggtttggaaaacatgcgagtgcccactttggcacgaggacaggctcgaagaagtggcaaatcgggcggtacatgaggaggtcccggccaacgccaataaccaagtccgccagatcgcatttaaccggatagtcgatggcctgcagcagcatgaggacaacggctgcgagcaccacaggaactcgcaatgggttttccgtaagactggaagtttgcagtgtgaggtctgcaaccattatatgcctgagtacattttcatgtgcagaggttgccggattcgggcttgcaaccgttgccgaagacatagaatgaggtagttcgctgcttttgcacggcatctcgtgaaagacagctgagaggcatggggttactctgcaagtcattcataccagtctgcttggtgggagtagaaggaagggtgccattttagactgtcaatttactagatttgtctttgagcattggggtcctcgagccgatctacttgaacgaagatatttgctggcagtttgggcgtaattcttattggaaatcaaaacgcacttttgcgtcattcgactagcggagagcggagataatacatgttaagatttgatgtgtatagcacttctatcaattacctcgttagtttctgactttgccttactgcctgaggcattcacattcttgatatcacgtgctagctccggcttatctccgtgctgacaaaacctatcgccgtggaatcaggtcgaattcgccagcgcctgcctattcgggccatataagcagtttccttatcgcagttcttcactcacgagctcttctctcacgatttgctgccatacgatcgcacatatacttgtacgctataatggactctcccaaggagctaaccgtccaccaccatgggaccgcgcatatcattcaagttccagactcggcaacattacaagacctctcctccgagatagagcgcgtcctgaacattccggtcgacaaccaaaagctcctcatagccccaaagcctggaatgcagaaagcgcctttcccaccaactctcctcgacgccattctccaaccctcctccccaaaattcaagatcaccctcctcggcaccccggccaaagcaatcgccgatctgcacgaacaatctgccagcgaacaacgacgacaagaattacgtgcgtctgccctaagtgccgcaagacgcaataaacgaacaccgtcgtcccgtagcggcggcatccacaccatctcatcttcaagcaacaactacaccttccaccgcctcctcccactatcatacctccccaacccagatcgctccctcgacttcctcaagcgcctccgtgacgacccaggcatccgcgccgcaatgacaaaacacaagttctctgtgccgctcttaacagaaatgaacccggcggaacacacgacgagcgagtcgcggacgctaggtctgaaccgaaatcaaggcgaggtaattgagctgcggttgcgaacggatgcctatgacggataccgtgattaccgtactattcggaagacgctgtgtcatgagcttgcgcattgcgtattcgggccccatgaccgcgacttctgggatttgacgtcgcagattgagaaggaggttgatcgcgctgattggaaatctggcgggaatcagttgtctagtcaggagttttataatcctggtgattgggatagtgcacaggatggggaggagtttgttgatgagtgtgggtggactggtggggagtttgtccttggtggattgcaaggggactcgactggaggccgaaatgctgcttctggcgggacgttgtctcgtagggaaatcatggcgcgcgctgcagaggagagaatgaagagggagagtcaggccggaaagcaagatgatgccaagtgatatcatggcacgctatgcttttcatgatttacgagttcttgcttttgacctacatagccgttgataccatatttttagttcgtaattaactcatttctgtacattgcagactgtatattatcacttaattataccaatctagatatttacagctgctcgttaacaaagagaccagccataccctgaccagttccaatacacatggaagtgaccagaatcttgctctttgtgcgacgagcctcgctcagaatggtcgcgatctggcgtgcacctgttgcgccgagagggtgaccaatggcaatagcaccgccacgagggttgaccttggcgtggtcaagaccaagggtattgacacagtagacagccatagaggcgaaagcctcgttgatctcgtagatgtcgatatcattcttgtcaagctggaacttgctcaacagcttggggatagcggcagttgggccgatacccataacgcgagggggcacaccggcaacggtagcgccgcagaactttgccaggataggctggttcagctcgatagccttggagcggcgcatgagaaggacagacgcggcaccatcggtgacctggctggagtttccaccagtggacttgtcaccgaactgcgggaacgcagggcgaatcttggaaagcgactcgaaggtcgtaccgggacggataccatcatcacgggacacaatcacctccgtaatctcgccagtcttgggatccttaaccttggtaggaataggaacaatctcgtcagcgaaccaaccgttgttctgagcagcctcagcacgacggaaagactcggcagcatatcggtcctgctgttcgcgggggacatcgaagtccttgccgatgttctcggatgtctggcccatgggctgcatgcagtcggcagcctcctggttgcgcaggacctcctcgttgaatggcttctccaggcgttcgccaggagcggacatgagctcggcacccatagcgagaccgatgtcgatggcgcccatcgagatctggttcgcaatatcctgcaccgccttcagtccagacgagcagaagcggttcactgttgaggcaccggctgtgtgggggatgccggcggcaagagctgcggcgcggaccatgtaggcggccttgacttcgttgacctgtctttgggttagaatatgccacctatgagtttatggaggaaggaaagggattggacatacgttgccgaggcagacatcctcaatcagagcagggtcaatctgtgacttggccagagtctccttcaacagggcgtagaggagatagtccaattctgtgtccttgaatccacccttacgcgcccgggtcagcggtgtgcggattgcgagggtgatgaccacatcgtcggggttcttctgtgtactgtgtgtgcttgttagactcatgacacacaactgagtttgtctgaagacttacatagcagcgaggccgttggcggcgccgggcttgaggtggctcaggagtgagcttaaacgatcagcagccattatgtatgaaggtttagagattggactaatatatcgtcagtcttgtgcttctcttctttgttgaagacgccggtactggcatggaagttttcggtcttaatgcggggaagcttccacgtgcggagattcgaggagagtgaatgcaaataactcaggcactgggagaataacttacagactgtacagaattaggatagagacgaggaataattcaagcaaaggggaggaagaggagagagttaaaagaagtatcaagaggaggaaggtcgacgttccggccgaggctgccgaggttcatttcgcctgtcaggttatccggtcaataagtatctagtacttcagatttgcccagaactactaactgtaggaagtaccaaatactttaccaagatctatttccagttttatggggttggcttgtggagatgcctaggtaactcggtttgtccgagtattattggaactttggaatatactgtaacataaaccattcatttctagtgtctagataggggtaaaccatgctattatttcgttagttctggcatacttggccttctactcgttgcccgttctgggatgcgatattccgccacttgttcgatcgagacgttgtcgctcacgtcgacagtaatcagttctaccgatgtgtcgatggaatctatatgtatacactcggagagatagctatgtgttgttataccttcttgatgatcactaatatgtgcccaccattatctcctggcgcagccaatcctcaaatcttccctcgtgagctttggggtcagtgtcttcccagttataagaaccagtgtgatagttcaaaatctcgaaatacctatggacgattagcacagatcaatacgccgcagatggggaaaattcatacattttgctcttccattcatctgtagtcatttctgaatccaacaaagacaagtcaatttgtttctcacactcgggttcgtcattagagtccgaatagctcgaaacgtatggatcgcttagggcatcatccgccgtgattctcttttgtggatctatatccagcattttctccaagagatgaacggctagcgaagtcagtatcattggaggtagataaatcaggagcatttgatatcaatcaagatctcaagggcataccttcagggtcaacatctcccaatgtagctccaagtgaccggggttttgtttcaggtagagagttcacaaaatccatcgtctataatttgtagttagcatcttcccatccgtccctaaaccggccgtttagaagtcgatcatacaatgtcgctgtagactgtctccataatctctctgggcggcttcccaaagatctcagtgatcagtttgaagtgatgcacattgtcccttgccggtaagaagacctttcctaggagcatctctgccagaatgcaaccagtgctccaaatatccaccgcgtaggtgtatctctgccaggtcaacatgatctctggagctcggtagtatcgtgtggagacatagccagtcatctgatgatcttgttctcgagctagaccaaagtcacaaatcttcaagtcgcagttctctgtgatcaaaatgttgctaggtttgacatcacggtggatgacaccagcagagtgaatgaattttaaccctcgctgaaatagtcagatacactgatatttctggatcactcaggcagacataccagcagttggtaggtgaagaactgggtgaacctgtcctccaatggctttgaccttgattggatcaaatgatgaaggtctgtcatgcaacaatccatcacaatataactattccaacatggttagtatgattgaaggagatagacaagtgatttccgtacagatcttccgctggcgagatgaagatgtccgtcatgttgatcaactattggcgattagtgttgtagctcatacttcgtctcttttctacacatacattatcatgttttaggttgttcatcaaatgaacctcgcgatatgtgcgtttgacccgggaagagctttcaaagggtttccctatcttttttatggccatcgttcggttggccattgaatcatgcgccgagctgatactggtggttagtggtcttacagcacgaatagaatatacgagggagataccagattaccccaaacgcaccaacacctcgtgctttcaagtctgtgtatctctcggtagtttgaagggtggtgcccatgattttatgtgtgatgaatgtagccatgcttgcaaggttgcatgtgtgaaagttgaatggattgacggaatagtgtaagaggacaaaggatccccggtatactataaacgataccgcattactataattagtcttccaagatcccaatgttcttcttcccaggtctaggccgtgtggtcgttacgtcacaacgtggatgttcccatgtggttgatccattgtggttggccagttggccgttttacatcttgatttccacgtatccatgccgagccggttataacggattatcatctacatagtatatatgctcaaagtagtggacgtcacctagctcgatcccaatcaccagactctctttcgcaattgcgtcaatcatgtcccaggtgatcgaacgcgagaggcaaattacgatctttgccttcgaatttcctttgctgctcggtacaaaatgaacaatgcctttctagaagtccagaataattggaaatttaacggaaccattggtacttcaattgaaatagagcataaatgtaccttgtatcgcattaacaaattgcagctaagctcaaatctaacgccaaacaccgaatactataccgaaagttccccgagccagtaaagcccacccattgatccgtccttgacggtccgagtgaatcagagcaactgatgtccagcatcctcgttgctaattacgctacccacgtcagaccatgccggagtagccaaaccaccaacagatcgcccatcaaggtcactaagagtgccatctgacgtttcatcttcaaatcctccgacatggctgaaacttccagcggtcgaaggagcggccgaaatctcatcgtaggactgaacgctctcgtggccgaaaccatctagctcgacaaggtgatcactttcataatttatgttgtttgccgcatcagggtgcgcataatatacctgctgatggtcttctgtgtggctggaaccagaggcagacaagggagagttaggagagaatggatcgaaaaggttatccccctcgggtgcttcagaccgaggcgtaaactggatcatagattcggaaggatggattgagggagcgggtgaggggatgtcgacatgcagctgattccgacccggtgtagttgaggattcggcctcagttttcttgacacctcggcggaaaggctccgaagtccccaggtcaactcccgttgagttagcagtaaattcttcgttggaccgagcattgtattcgtggtctttttgtatacgcagattgccctcgctgtcgacgagggtatcaaagctattatgaggctggcctggctggctggacttccgtcgcgattcaatgaccgattcaatgagctttccccgtcgtatgatctcctcacgagcaatccgtctgcgttcttcggcaacctcgccggtctcctcagtcatggaaatgtcttgccgcaacgctatgtcttgaggttggatctcatcgccgaggttgtgcagagccaaggcgatcttgcgccgcgagttggttacccattgttgaaactgaggcgactcatacacggcgatgccagctgctacaagcacagaaacagtaatgatgattcctgcatgagagtttagcctcatcgtatagagagtggggaactgataaggccgagtacacggctcggatgatccgggagggaaatgtagaagtttagggaggtagaggaccataccttttgcaagtggtgctggcataatgaacccgaatactgtacttgtctttcctaaaagtgttttcgaaactcaccaccgtcaagcggagcaagatgattcggtgatggatgcctggaccttatccttgcattatcgcgcgtgaccgggaaagcccttatcattggccctaagtacacaccgctttgggtaaagttccccgcgtcaaagagggacgtgattgcaagctcccatctcttgactcgattgatgtacaattgaacttgaacgatacatcatgtctcgccaattttcgcaggcccaacggccgttgtccctcaccgaggagcttgagaaattggaacagtccatcacccttacaatgcaaggtagggtagagaagtaaacaaaacagtccagcagaccgctcatcgtcctatcttcgaacagagatcgaccacaatttcagtgaagctcatcggatagtcactacgagtatactgcctctggtacagcaatataccgagcattcacgagatgtctgggaaggttccaaggttagcgccaccagcttatacagctatagacagattggttgactccctttagttttggaagcaattcttcgaagctagtgccaacgtatccctatccggctacgaagaaagaaacaccgatgaagaaacgacgcaggaccctacagccacggaggaagagttgtccgccgacataactcaaagtactaccctcgacgagacaatgtccaacgagacaccatcttcgcagcgtcatgaaacaccccgccgcgatcaggcagacgatcttgatctaacagaactcggcatttcttcgcacagcactccgcgtgctccgggcggccaccaccaggccgacgacgacataacaacctcctcaatggagtactcgtcctcttacgagaacctaagaagacaagtcaatgaatccgaacccccattcgacctcccagagtcctcgaccctcccatccactccaggccgccagctcttcttcccacgcggcgtctccgtcacaaccccgatgtcatcaccattccttccacccgcggagccatccacccaagaccgtcgataccagaagacctcagacccggtactgcaccaaatgctcgacaagacataccgggtgcaagccacgccgctcggaaagggatttcgcaatgtgggtggcggcacgaacacccgaccaaagttcaacatcaccccaaagccggccgagtctacctccaagtacagatatgacgactcgccgatttccagtccagagccagaggcaccacagctccactcggaagtcttctcatcccccatcaagggcatcgataccccgggcacgaaccgcaagcgacggactagcagtaatcgcatgcgcggtattcccaggcctggcatgagtgttttgacacctgctaagaagtctgctggtaagtcagctatgtgggatagtgacgacgatctggattacgacgatgaggaccttgggccgagtcctcctaagacaatgcagtttcacattccgcagagccggttgatgcgaacgcctggtaataaatcacttgatcctatgtttaatactatatccatgctaacccccttcgtcttggtagcaagagaggcttctaagcgcattgtgaccgatttgctggctacggctggagctggggagattacagatgactttagcgacgatcaaagtccaagtgtgatccgccgcatggagcacttggaggatgaaactttctaaattcgccaagaaataaggctgactataggttcttcacattgaatatgcatggctttttttcggctacattccccacattacacgaatacccatgaatattactatgacgtcattattgacgaatgccagattcagtcttcagatatctattagagtagagaaacagagataagagggcacatcctttagtataatcacacaagtagacacagtaaaataaatgtcactttttggactgagagagcccttgcggcatgaacaagaagaaaaaacgcttaagaaatcatgtacgggggggatgaaggtcaagcgagcaatgtcatcgccccgtcccatctatcattatggtccaacagaggttgcgggctctcagtatgaaatagaaagaaaatgggcagcgatgtccgcgatggaccttggccaatggtggtcatggaggggatgaacaagaagcaagatagtgcatctaggagctcttcttcttgttcttggactcggtgtcctccttctccgtcttggagtccttctcatcattactctcctcaggcttcttcttttgttcgtcttcagcagccttctgcttctcttcatgctcatagagagaaatgtgcttagagctcaagcgatcctcctcagcagcaaccatatccttccagagatctccctcattattcgaggcaccctggtgggtaggctgatcctcctcaacatcctcaaaccgaggcttgcccgacggattcgccttgttcttcgcgtccagcaagccacggccgcgacgctgatccgagatctcaaacgcagccgaagcgcacagcacacccagcgtcagaccctgggcatagacacgagcctggacgagcttctgctggccgctgaggccgggaatgcgaccgaccagggcgaatgagccaaccatcgaggcgagccaggtggcggtgataatcttgtatttctcacggcgggcgaaggcagccgcgcggtcggtgaagctgagtccgcgggattcttcggcgcggaggcgctcttcgcgattctcgtaccatttgtatgcggcattctgctcgttctcgtattcgcgcgaggcgtggtcggccgcgatgataccggcgaaagtacccgaggacgtcaccaggaaggccttcatggggacggttaggttgttgattgtgtgatagcgacgtgaagcaagtaggacacctgctattccggcggcgagacccagcacgccaccgactgtgccgcctttgaggacggagctattggggggttatcagtatgggctgttcatgggaagaggttgcagggctttcgtaccggtagtgggcagcttcttcttctttagtaaggatcttcattgtgtaaaatagtgtatttctttagaatgaagtaaaggaagaaggtgaaatgttcgatataaaaccaaaaaagcaaaggccggatcgcatgacgtgggatcgcgggatctgctctttttccggcgttggcccccggccatcactcggtcttgcacggaactgacttgccttgattttgtggctttttttggctttttttcttttctgacctatttagaatttaattggcttctcattggctgtttccaatatgaatttcaattgataaagattctgcttattccactcggaatgcgaaacgtgacacactcccaaatccctggccccgattgatcccgaaacgcccaaacaccgcaaatagtatctcacataacggaacaggccactgccattttgaaaagaatttactggtaccaaatctaccgacgagacgccttgcgtgcggcgacctggcgggcttgcatcttgcggaaacggtcctcgccactggcacccaaggggcgcgcaaactgactctcgcgcacagctgtctggcgcggaaccacagtatagctgacgtttgtacgatcgacgcgagcacgattgagaaggcggggagggagcatctcgagggcgcgggcttcggctcggatctcctcggcggtgggaggtgcgcgcctgacgactttcctataggggtgttagtgcgtgatagggcggttgtaaaacagtgaacatacgtaggatcataatcagcctcctggtagacccgcttagaataatcgtcgctgcgctgcagaataggtcgtgtccactccgctagcaacttctctgccatttccttgatgcgacgctcggtgcgcttgctcttggtgtagaaaacaaccacttttccaatgccactggcaatcaaggcatccttgttgataggaagtttggtaatggcggtcaataggtcgcgctggatgttgtaggcgggcatcgcgccatcgtccagaggctcgaggaagaatcgaacggcttctagtaagttaatctctggatcgaccaaggcgcttgtgtactggttgcgattgaggagcatgatgacttcagggagcagcttaagcttgtgcatagccggttttccttcttggcggtttatcgcatccatttgcgctgcgtgggtcatgcgcttgcgcatatcctcaatttcagcatctgccatagattccaaatcctaatatgacagtcagtaaacgtaggtgggtacctgtcaccaggcgcaacacatacaatgccgtcctgcttgcggaaacgtctcttcgccggctttttcatcgcctcgtccatagcacggtcaagggctcgccgacgtcctgatgattgaaaaccagttagtacaaattgtgtgcggcgggaaaggagttgccagtaaagagtagcacatacgggtctccgggtcaagggtctcctcgtctgtctctggcttatcctcgcgctgcttgcgctcacgtcggcgagatgagcctccttcgtcgcctccctcatcagctcgacggctctttttctcgcgacggccctccttccggcgcggacgactctccccatcctcagtgcgcttgcgcttgtgacgaccaatgagtttcaagttatcttcatcaatagcaagttgcgggcggtcctcgacatcgacattctctgggtcgaagttgtcgaattgtgcctcgtcaacctcggataaaatagactcgtcgtctgaaagtttgtcgtcgtcgacttcgtcgtcatctccaccgtgtagctcgtcatcggcattcaccgtgacctccttagtctcagcagtaggttcagtgacgttctcaccctcgttgtcgccaccagtaaccggggttgcggcttgttcgaggacttcgggttcgggagaggcggcaggcgagacagccttgcggtccggtgaagcagacatagcggttcagatggcaccagaagcgaaggggtagattaagaacaaagattcaaaggcgtagaaatcagttaggggggtatcaaacaggtccagtacgttatctgcctaagtgatcccgacggttctccgcaaaatcaaccggttttctgcggattggaccaattcagatgcggtgtggatgtagggattgaagagaggagccaacaagctgctcacagaattagtcgatagaatgtaaatggatagagagaggggagacagtgaggcaaaacctcaagagaaggagagcggtggtctgtgctcccgtgatttatttctccagtccgacttggacatcctcgtaactacaactctcacaacatctattatctgaactctctttcgttccttacttctttatcatattcaaaatgtttgcaccgggtatgttcccagttgtatatctcttcgctctagcacactcgaactaacaatataactctctaaggccaagaacagatctctaaggaagagctcaaggtcagtttcaagccatgacctctgccctaaatagcatctgatactaatattatttacaggctggtgagattgaggccttccagaccgtccagatggctattgccggtggtttcctcctctacctgtgtaagtcgagtatctgaagccttgaacacctcgagacgagtcagaaaagagttggggctgaaaactaacattgtcatctaatatatagcccccttcgccgtcgaattcgtccgcaagttcctttaagccggttggcccgtcttccgctcctctttcttgctcttcccggactgtaatcgacgaatcgctggttatgatttcccgatgatatgcaggagaattgaacatttcattctttcccctctggcatagctttttctactgcccaaatcggacaggattgagcatgggcacctaattcatggaaagctcttgaagctcatatactacacattttgggtctgctgggcagtgtcagttggatgatgtattactattgtgcataggctcgttgtcatttgtggtttatgagatatagagcaaatcaaaataagatattgcattatatcggaatctaggtctcgcctggctgtggcaaagtaatgagtcaacatagcagagtgggggagcggtttaaggcatagatatacactgactagggactatctgtggatagtacatgtcattacgaagacttggcgagcaatgctcattcaaagacacccaaaatggaatacggagtgttcagcaagaaatttgtattcagatatgcattacaatggcctgatccccgagaacgccggtaccccgatgaccgtagacattaagtccaaacatgtgaggaaatgtgaggaaattgagaatcaaaatagcacatagaaagtcatagagcaatgctctcaattgccaattgctttctccaccgcgttgaagtcgttcttgatggactccatctccttctgaagatactgaatctgagagtgataatcgtccaaaatctggtacatacggttagcgaactcttccgatactgaggtttcacaagctcgggactgccgaaccttctttgctgtcttcaatgtctgctcatcaatgtcatcctctggttgtgtcacgtttaccccggcacgatcgatttccacttgcaatcgcttggagtgttcgtggatggccaacatacgggcccaaatttcttcagcacggccattgagagacgggtcgaaaacggcacgttctagctcaacaagctttttcttcaactgttcctccgcttcatccatggcataccctctgttgcgaaggatctgtgtcttagccgcaagggagaggcaccgtttgctcagaatgatgtgtttccgacggcagtcggcgatcttgacggaaaggttgagatcatgcttcgagagaagcccggtcaagcaatcgttgatctcgtgcaggcgcgactgcatcatagtgaggaagtccctttgtcgctgcgcgcgcttaccgagttcccagaagcccttgacaagcacagggacatatcctggacccggtcgcttgcgcaaagcctcctcccactttgcatcatcgtcctcgggacccggttggtagaaaggagcggcctcctcgccgacattattgtacaggtaggcacggaatggcgagctttggctgggcgggtcccacttatctttgatgatggctacttgcataggaacagtccggtgcactagaaagtagtcttgtcagtaatggttcgtagtgaatgattacgcaataggctcacccccagtgatagcacgaccaggagaccaaaggcttgacgatagagaaggctgttgctgttggggttgtggggttgtcatcgtgttctggccgaattgcgattgctgctggccgaatgcatttgtttgttgttgggggttggaacccagaccaccgaaccctcctagtgcagctggttgttgtgcttgctgctggcctccggagaagaggctaccttgcggtttctgtagcgaggagccgaatgcgcttccttgctgctgctgctgttgttgctgaggcgcggcgcttgcgccgaacgcactcccgccaaatgcattggttgctgtcgcggctggctgttgttgggtctgcccgaatggtgtgctggtgttgggttgggctgcggttgtagaggtgccaaagagagacggcttcgctgcagtgttgccgaacatgttgttggcctggggctggtttccaccaaagagagacatgatggcaatcacaaagacaaaaaaaaaccacgatgaagagagaccgcgtcaatggatcaataaatcgctagcgcagctagattaagagcgctgaagggaaatagaaacaagttcaaagcacatagtctagagactggggggtgacagtcgaaggtgagaaagctgaggggttcttcgatggagctcgaaggccgagaaagatgagccggagctcgatttgtttgtgtcacgtgatgtgatattgttcgcaaaccgcttaaatgcatattgaaagaaagagttgaatcaatagtgaattagaattgctttattgttctatgttattgtcctaatggatttttcttattgatatatccaataaacaaaagcaacaactcatatacgccctattccagcaccgcacctaggcacctcaggtgatatattacgctgacctaagcaaaatccagacagccaatcaccgacgagccaaatttcattccaccgcaacccgcagctctcgactatcgatctccaagtctcgcctcaattgcacctctttcccctcacagtcgttctgacaagccaccgtcgccatggcccaaagagatgctcggtatgtaccttgatctcaattgcttcctctccgtatagctcaatgtgagacgctaactgctatcccctccgcgcacagctttaaccagactgtcctggtggacaccacgcccatgcccgatcacattcccaaggtggaagagatcggtgccacatctgcacccctgatgagtgcatcctttttcattggagaccgctgcaaggccttcaatgacgactacatgaagtgcaaggacgaggccaatggccgcggggagatcgactgcttgaaggagggccggaaggtgacgcgctgtgccgctagcgtgtatgttgctttgtgatttacctttggatcgagaaggagatattgacccgtcacagcatcaaggacatcaacaccaactgcctcgaccagttcaaggcccactgggaatgtctcgagaacaacaaccaccacctatgggagtgccgtaggcccgagatgcagcttaacacctgtgtcttcgagaaattggtatgatatacgccttcttgctctcgatcgcctatcacctcgcatccattatatccgctatcactcccggactagagctaacatacacttctcttgtttctttagggcttgaagaagaccctccctggcgctcccgagaaccaagttcctgttcacttgcgccccaagcaaaaatacgcacagtaccccggtccccagtggtaaacactgtccctgtttactttgtcctctctagactcaccctgattgcacccttatccttccctctcataatctgggcaccgtcttttttctatagcactgttttatttggatgctcgaccgtaaatccggtctatgtttgtgtaaatatctcttggcatcatgaatggttacatgattttctgctcgatctccaaatctccttgccttgctcacatggcatgcacggggcaatatgttttccaacctattgcagtgtgcaatagcatattctcgagttggtaaagtacggactctatagcccgctggctctcgtgcaccctcggtttgatgcctgatttgttcactgagcgtgacctgaccgatccgacttgcttactgagcataaacccaataaaatacaacgcgataggcccgtccaatgcagtccttcatcaacgctcttgtccccttaacaaagggctggcgtcatctatgtggcggtccagccctggttgcttcgcctctaagtggaagggaaatgctgctatcccgcggctatggcactattcagtctcccatccacgataccgtttctacatagttgcaagaactatccagccctctggttctacgatatagacgtcaggccttttgctggatctgaagggtgaggtagaatactatggaactaccatattccaaggtttttgatcgagttctcagtacttgattcctggagcaacgagtgtataacggggatatacatgtacatttctacaaatcaagcccgtcaaccgatgtctagaaaacgacgcggtctacacacttaatcaatgactcgatgtatatatatctattcaggtctacattgttctttgcccttcaaattgccaaatttttctcactttattgtcaccctgttctcactttgttctcaatagacaacctcagcccgcccttctacagctatttatttcgctttcttccagttctcatatcttctttcacagacagccctctgtgatttttattccttgcatctacgctatgtccattgtttctctggcatatcgttcgccactttcttgaacagaagacttgacaagaatcctgactcctacgaagccctcgcagctcgcagtgacctcgttgagtctgccagacatccagaagatcatcggtctcacctggttgcagatgatgagttcgactttgttacacctgtccccgtcccgcaaggctcgatgtttggaaatatccagaagccccattataccttcggctcaagtgcctttgggcagccccagcagcaacaacagcagtatgttagctcgatggactgtacaaataaatcagctaccctcagttagaactctagttggaaaagccggaccgcactcatggcgcaaacgaagccagtatccgctgcaagctcgaactcctccttgtctgcgatcacgatctattttccatctttgaacaaatctgctcgacccttgaacattcaaatggaatgtacatgggcgtatagctctgcgaaatggaaggggaagacatcgacttaaacattgctatcatggagaccaagagacctaccagttgttccgcagggattccgcattcccatcccgacccattgctgctctggtccgaatatgattgacaggcaactgattgccatgaatgtcgatgatgagtgcctctcattgtcataccccggcggaacttgcgaatatgatgatgcccgatggtttcactgtatggcctcttatgggatcaacagcgagctttaggaggccattatggattcaaaatttcgacacatccgcctaaccgaaacttgcaagctctggcttcaggacactattcacttacgataccgggctacaaccccctttaccacggaagaactggggcgggtcacaaggaggttacaaaacatggctctagagagctgagaaacagaaaatactggaggcttcactgtgctggcggcttcactgtgctggtggcttccattggagtacagaagccgtttgacaattccgaagccaagaggcaagaagcttctcgtgagcgtgatcttggcatggtatctaaaggcgatggaggcgtcccccatacacgcccagtcacacaccagggagggatctggggggttctctattccttgctcttcttatttttacccatggcccttcgctagtattacttgatcgaaatacgagtctatctatctaggctatgacccaattaatagatagtgagacaaattctctgcttctttgatatcctaacccgtagcccaaaatctgaaaggagtcggcagatgacagagtattatgctcttttgggtctggactgagcgtgctaggttaggaaacccatatgtaggtaaccattgcaacaaataaactagccacctttcaccctgacattcctctgcaggaaagcttgtatatattggctctagattacccaggcttacgcatgcactgcagagtctcaccgtgtatataacatgttctggctatgttttccttccgatctctgactttgtccaacatatgaccaccgagtaatatgggtttttgttcttgagagctaacttaacctttagagaattggtgatagtatacatgtaggcagcgtgcgtgaaacataaaggttaggtgggatataagttcgcttattcctaacgtatctatggataatattgctgggcatatcaagctctataattctattacgattagctttgagtagatctgatctaatgataccttctcaaaatattgatctggaccgagcgcttttccgggctagtacaaaggcttagcatcaaccgttctgcagcgtctgaactacaatgacagattgttaatcgttacattctataatccgaaggaatccataatcataatcatccttcacctgattcgattgcaggggtttggcctgttggtcaatgtgtgtaattgagccctaattccggccctccgatatactacctggtgtaactatgcctttgagataatccgaaacatatctaggttggtttctacttaggttcaagagtccgcttgtcacagaatgcatcaacagcattgactggtcattggagtgtatctgaagtatttcggaatatagaaagcatgtattaaatccggggatttagacccaaggtatgaggaaattacaaagagagagaggccaagagtacgcttagatctagatgcacgaatagcggacctccggcatctatctatagatacctcgagaggcataaatgcaggtatcaaactctccaccagtccgtgcatgtgcgacaggaaaacaaggatatagattattgatacaaaagccgcacttccttctctaacgactcttcatatcgatgtactacttacatctatagtctgagccatacacgcaggtagacatgaagtcggcaatattcttgattctatcattatggagaggtgtccatcacgtccaagcagcggccgtgttcgcccacttcatggtaaagcccttcaactacgatctatatctccgctaacctccaccaattccagctatacaactcggagaacttcacggtctccgactgggaaatcaacatagcagaagcacaaaaggcccacatcgacgcctttgctctgaacatcgcatacaacttcccaacaaacaaccggtccctagcgaacgcattcaaggccgcaaataccctgagcttccaactcctattctcatttgactacgtaggcaacggtgcctggccagaaggcgaggtgatcggcctcctccgaaaatacggaaacaacccagcctactaccagcacaacggcaaacccttcgtctcaacctttgaaggctcctccaacgccacagactggaccacaataaaaaagtacacagactgtttcttcgtaccggggtggtcagccctaggcgcgaaggaagctctcgccgtcgcaccaggcattccagacggcctattctcctgggccgcatggccggaaggcccagacccgataaacacgtacatagattccacgtacatgcagtggctcaaagacaccggccacctgccgtacatgatgccagtctcgccgtggttctacacgaacctgccaggctacggcaagaactgggtctggaacggcgataacctgtggtacgaccgctggcagcaagtgctatctctcaagccggagtttgtggagatcatctcgtggaacgactacggcgaatcgcactacatcggcccgctgcatgagggttcatatgcgaccttcgagatcggtcatgcgagctacaactacgctaccggacacccccatgacggctggcgtgacttcctgcctttcatcatcgatgtctataagggtgcacggccgaatgtcacgactgagggcgtcacggcttggttccggctggcgcctgggaaggcttgtgccaacggtgacactatgggtaatacgaagacgcatgggcaaaaggagttcccgccgacggacgttttgcaagatgaggtcttctactctgcgctgctccggaacgctatggatgtggatgtgtcggttgggatcggcggggtcgtgcaggatgggaagtggaagaatagaccacacggtcccatcggtatttatcatggcagcgtgccgttcgacggtaataccggacaagttatcgtgacagtttctcgtcagggaaagactgtcgccgagatgcggggtgcatcgatctcggaatcgtgtccggatgatatccagaactggaatgcctgggttggcacgaaattcgccaataatacgatttcacgtccgccgccttcgccggctccgactgaggtttctgcggcttcggctcttctggcgctatggaggatcccgtttgcgattgtctttgtggccttggttgcgactatggtggctgcgacggcgacgcctgttcagcatgagaaattggctctgacgatcccgatttcggaaggttctccgtcggtatatagtgctggtgcgggcgatgacgatcctagaagtctatatagccatggcacgagctatggtttatatccaatcaacgggtatactcgcacaacgacaacgggtgctctaattacgccttttaccccaactggtgccacggctttcacatacagcacatcttggaatttgaactgatctgagaacagcagtggatctcaattatcactaatgatgttgaggaataatactggcgatctaagatacgactatatatcgaggttgaccgttaggtagttatttcttagggctttgaattgtcatcaaatctatgtaatctctcaacgaaagaggacagcaacgtggtgaataacttgactaatgaatatgacttctaatagggtacatgccaaatgatatcaaaacaaaataggaaataaaagtacattgatcatctatgcttggaatgtaagcccttccccccaatccatagcatctagactgatgttcgcatctatcaataactcgatatagttaacctcaagtgctgtcaccttggacacagcatgtatcagacacccaagaaaagaaagtcgaagacaacagaagcaaaagaggagggactcccgaaacctgaaattgaaacccatatatactagacaaaagaaaagtcaagagaagtagacacaagaaagtaaacgaggagataagggaatagccaatgcaaacaatgcccggagaaaaatgctgcaaggagtcaaagaccgataaaaagaaaatggaaagaaagataggccacgaccatggccatggccatagaacgccctttatggcaataaaggcgcatccacgatcctcaggagcttaagcctcgccttaaccgccgcccagcccgtcttaagtcgattctcaacacgacgatcccccctcaaccgcatccaaataagcagcatgcccagcatggcaatatcaaacaagatctgccgcacagcaacccaaatcatccacttcacccacgctaacagaccagatcgacggcgatgcgcaatagaccgagcttccatctgctcgcgcacagccgcaatctccgctgtcattttcgtcaaggcctgctcgacacggcggcgccagcgactgtctttcgaagctggctctgaatgggaatgtcgactatgcgggagaccgttcccactgctgtctatactaataccagaggcaggattgcgacgatgtttgggacggtgatgtgaagagacgtcggtatgtgtatgtgtgtcggtgttggagtgggagctagcatggtccgggtcatcgtgatcgtggtcgtcttgatctcgttcttcgtataagctatcacgggcttcctcaaactcctcctcatcctcatcctcgtcctcattatgcggactcccatccttatggttctcatcagaccccctccgccgccgataatactcctcctcctccggctggctcataggactgagaacccgtaaccgcgagtcccgatctcgtcgactggtatcatcccgtcgatcaggacgatcatagtcctcctccgccattcgacccgcgatactcccatacgcactgcgcgataacggcgggacgccgactgtattcaccggactagaagtcgacgacgacgaggtgttgaacttaatctggtcccaaacgaattcgagctcggcgactagctcgcgtgcttcgggtgtttgggatgcatattggtgcatggtgtggatcagcgtcgagatgtacctgcgtttggcttcggtgcgcgatatgtcgcgctgcgcataccatgcatccctagacaagacaagaacattgtcagtgtgtgtggtgtcggattgtagagcgaaaagcgatgtttcatagacccgagcaagatccacaataatcaaaagctttctttttccccgcgcttcgggacataccatttctcgcactccgcgtgcacctccggcgtgttcccaatcggacgatccattactccctccacgtccccctctgatgcagtattagctcctccggtttcctcgttgttgttccaggtgtaatgccggacactcacccatactctgcttatacaagccatatagtgccaaccgctcggcagcgggaggtcgcgcggtgccggtccggggaatcctcttaacggtattgagggcatgaacaaagactcgatctgtgatgagcgggtgtcagtggaaatccggatgcatgacgcagggcgcaatctgcacaacacgcacctacagagtccgacatgacgcgataagcggtccggtttgccctgtcttcatgggagcggggttgggcatcggcttgcgcgggtcctcatggggagcgtagaagactgtaaataggaatttggtgatacagcgaggttttttggttcttcaagagagatgctggaagggggtgtgtttggtgaagagggattgtgtccgatcggagattcccgaggttccctggtttgactgtgattttccccggaatgtggtcttcgtttcttccccggattgaaaaagattcactccaatcaaaatgtggaaagaaactcccaggagatgatctggagatggcgtgtgttggaccgcggctctcggcgatcattaggcacttgtgattgtcgccgaaatcgcattcgacattctacgataattgcacttttataagttgaattgtttctttgttcttatttcttaatcgtgtatagtaacaataaaatacaaatgaagaccctttactcgctcggtaacttcttcatcgtctgcaacggtttctccgcatccactggcgtacccgtcatcaactcggtggcggcgcgcgcctcgtcaccgctaatcggaggtccagtaaagtgcttgcgcgcataggcaaagtaccagatgacactaatagcaccgaatccagcgaaaacagcactggcataattcatagactccggggtaacaggcaaggtaacgggcatgcagaagagagcgacagccagcacgatccacgcaatggtaacgcagttgatggcgaatccaaagcgaccgagagagaacgaggaattcttcacgtcttggcggcctcgaatcaaagagatcaaaatcgggagaccgtacgaggtcgacagacagatagtagccacaccggtgaaggagttgaacgcagccgtggaaccaaaatagatcagtcctagcaatccatccacgacggccgatagcacgatagcccacacaggcacatccagcttggtgttcacctgccgccagagcgtgaagcccggaatggcgccgtcgcgagcgaacgcatacgtgcagcgactggcagctgtgagagacccgatgccggcgaacatcatgatccccagaatcaggaagagtaagccgaagccaccgcctgcagagccggtcactgtcttgaagagcaggccgatcggctggccgctggcgacctcgcgcagcatctgcacgttgggcatcacgaacagaatcgggatcaagtagaacaggccggtgatgccagcagccaccacggatagcacgattgccttgggcacctcgcggtgtgggttctgcacctcttcgcacatggcagcgaccattccgtagccggtcagggtgtatgccgcctgcagcaaacccacgaagaaagcccatccagcgggccagccgctcgtagaggagtcgtagtgagcgaagacgaagtcagcgtctctgcggttgtcggccattgtcaaaagcgtgacaaggataatgatgacactggctgcggtccagaagatgcagaccttgttgatgagatcgagataacgcgagaaaaagatgttgactagggcgcagacgagcatgactgcccagaacatcaatacggtctgccacgcattggcaacgaaggactcattgaagatggagatggcgctgaggatcaattggccgccggagaagatgatactcagtgtgacggtccaattgcccacgagggttagccagccgtcgatgaaggacatcaatggggcccagcgacgcgttgagagcatcgcgctccagtagtacacgcctcctgctgttgggtaaacggcgcagatctcagcgagagaggcggcgatggcgattgagatcagggagacgaagacccaaccccagagtatggtgacggatagaccgtcggagagggtgatgtagagggtcgtgctcagtccgaagggagctgccatgatggcaaaggataagccgaggatgctcagcatgctcaggtttcgaggcaattcactcttgtagcccatacgggccaatgcctcgtcggcggaggcatcgacagaagaacttcgcatgatgaatgtgttgggagaatgagcattccagtaagcaaggttgtcagttgatattatacctaaaacgagattaagaaagcgccccgcatagaaaacatggcgcggtccgagaccgcgtaacaaggttttagagatgaggcgaaaaaaaagatatctcgaacgaatgacagggattttttaggcttatctcgttgtatctttgtcctgggctgctaagaaaaggttgtatgacctaatggtcctacgataagagacggcatcatgatccacttggattcccctattttattcagacgcattcatcacgatatcacgatatcagatagcacatatatcacgtgagaatgcccctggatatacctcgcatcttaatcccatccatctcaaccctagacctggcacgcaagaaggcagagatgtggaacacgttggacaccataagaagatctacagcggggttccgtgccaagcatattctagcaccatgagtgcaagatcaagaacctgaatgggaggagaacacatctacagatcgtattgcctatgcacacggctcactaaggcactgactactttatacaacccaccaacgtaccaagaaggcattctaatgcgggggctgggatgaggacactggtggtgtggggaaggttgggtttcaaaggggacacttgcgattgacagattcggccggaagaggaaagtggtaccgaactagtccgtaaggagaagagaaatgcgagaatcctactcagctacggagaactcctactcaatacagtctacactggaaatggaatatttgaatgattcattgcacatacatcaaggtcacgcgaggtgacggctgccacatcaggaacatgctgcgaagactccatgcaagaaagagactgagcaatcgatgagcgccaggatggatatatcaacacaaaggaaggggggaagtagttcaaaaggtgaagtccggatccacacccttccttcggaatttggagggcagggtaaagggggtatcaaagtgggtaaagcacaaatgtcatccagtgatctcgctgggcagaagaaaaggaatttttttcttgtttgatgagatatctaatagaacaaacagggagatcagtaggggagggaaaggagtaagggcggaagtaggccctggatggtaaggccctgagtgttgaaaagggcgagagaaagatcgagatgggaaaaggctgtcgggatttttcggccgcaaaagaaccgtgcaagttgaactccgtctatgtgaccactctagtagtcaagtaggtcagtcggaccgccttttccgacatgtcacgttgaaagaagggaaataatgatcgaaagaaacgaaatgcgctgagtcgtgaccagccagctagtgccaactccaaatcgtaaaaaaaaaatgaccgtggtaacggaacgatcgtcagtcgaggtcggatgaaataacaagaaaacgcccattcatgcagtgtcgtcagtccggtgaagtcgttacatgagatgcaaatacagtcgcagaggtaaacagaggcaaacgcgagtttaaaagggtcagaaaggtgacgaggccggtgacgaggccaacatctatggactcagtccgaggtcatcattcaagtcagggccaaagccggccatatcgacagagtgcaaggatccaggtcccttgcccagggagatgtcggaggatgcatagtcatgtttgagtcgttcgtgtggtccgaagatatgcggtccgaagaacggtcggttctcgtcatttggagtgttgccatccccgccgacccacggcccgttctgccagaagcgggtattcgcttgctgatctccgaacagatcgtggtggtccgggtgaggatctgggccatggatggggaactcgtttggcgactgaaatcgtagatgcgaccgaccgaaactggagcatggagaatcggcgtggagcggcatgtcgagacccgagagaagggggggatcctccaccggggtgatgtcaatcgtcggattttctgtttgctgtgccagagccgccgacaaccggagattggaggatgaactttgccggctgtgagtagtcgatcgctcaattgcacgctgcacgaagctaccacaggccttcaagaccttttcttgatgctccggtgacagattgttgaagaaatcgttcgacagggatggcttgggcgggtcgtctgctgcaggaactaatccgtaggtagcctttgcgtattcggagagacccgacggcatattatagggagactggtaaacattgggtgctagcgaccgttgctgatccaggtaggcatattttccaggcatcttagcagcagccacgctaccccgatcaacggtctcctgcttgataccctccgactctttcctctgaataacatcgagtcgctcgcggtggctgactagcgaaaagcggagcatctgaaggagtcgagtgacctcctccgaccgcatgttcagagtctgaggcggcaacagagtgccatccgccgcccggggctgaacccgttgctgagccatggccagttccagcttctcgaggccattggcgggtggtattgagcccatcggacccaacagcgtctccaccaccaattcggggctgacgatagtgtatccggcaaagacattagcgtggtcggtaatttgggctaaccggcggcgagcaataagttctcggacattggcaaaggtattggtgggtgggaggtgatgctgctgctgagcgtgcgacttggcgaccgaaggatagggggcatgacgggcagactgattgggcagagttcgaaaggccgacggcatcgcaggagcaccagcagcagcaccggtaacagggataaaaggagggggaggggcgaggtgctgcaaggcagaagagggcggtcgggattgtaggtgaggggcgttgacattcgaagagtaaatattttgcttctgatgctggttttgctggtttggctgattcaggtttcggtagggaggggcaggggcggtggcagcataatgaaagtggtggggtgagatcttcgatgcacgagcgctgacacccatgccaagcgacttgacgctgtccaggaaattggcccgaggattgtggatggacacgctagggttgtgtgtatactgtgccctactttcggtggactgcatgcccaaataataccacatctgctctccctggaggttgaccgtcctgagtggggcgaattgattcctagtcgcatccactgtctcaaattcagcccactgatagggagatcgtgaatcgccgaatgcactgcctgccgccggtaccgctgattctaactcctttcgctgttcgggttttcgcgctaggtgggctgggaggggttggattcctagtgcgagaggcgtgaaattgctcttgcgaacaacaagcatccagcgatagggcatttcaatcacatctctgtagatttattagtgtgagcagaacgtcagataggggccggaaaaaaaaaaaaaaacttaccctctggggagcaccttgagcaaaagacttcgctccgaaggacgattttcaagaacaatggcgccattaatctccttgtcggcttgaaattggatcaaatttccttgcaccagacgacgagccgattcgattacccgacgatccacatcggacgattcacccaggactccattaggccgcttctggcgatggaacttgcatttcaaatccacacttggaatggagtactgcgtgccatcatcggcaatgacagcaatcgcaccgtgctcaacctgaacacccgccaaaagagcacaggttgcatgataagcgcgcgtgcattttccaaagttacactggaagcaggccccgcggacttcgcggcaaaagagacatttaagacccaggcgagccttggggattttgtcaatgtcacacacaacttccgtaccagatgcgtcacggagaattgtggtctcttctatgaacgccgcacaccgtctatgcgcatgccctttgccatcttcggtcggcagaagatcctcatagtccagattgttagggcatagcaagcacgggagcttccgtggtccttctgggtggagtttgggtcgtttggtattcggcccgtcgcccggattcttccgttttcggccacgagtggatgtcttcccaggcacactacgtggcggtgtaagaagatcagaagcgccttcaaagccatcgaattcgctctcaaattcaccatagtactcaggtgtgctctcgccgcgcagcttgcgctcgatctcgtccacatcgatccagacactgtctgcttcgcagttgcacttcttcgcgatgcgagcatagtctaaccattgctcggtcgcgaagttgaccgactcggcgcaattgtatccgacgttatacccagagtggtacccgtaaggaaatgtaatcacaaattctccttcgtaatgaaccaaccgattgacggtgatcccatactgcgatttgagaaggctaggcgagacgaggtaggttttgtgacgaaggaattgatcgcagttcttcgcatcactggaccagatactgcgcatgacctgttcgaagcgaggtgcatcttcttgggagatgctgtaccactgcttgggggcaccgaagtggatgtagttaatgctgtacagatctacatcctcaagatgccaagcaaaggtagccttccacatgcccatgtagagataagcagtgttgactccaggtaccttctgcccgaggacgtcaagcagattcggcaacttggcgacattccagatttctgtagaatcctcgaagagcgaaccgggcatgtcagctccgtacatcggattgttatacatgagtgacttccagtaattagtctcaagctcctcgcatctttccgcggtgtattcttcatggtcatggatccggtaatcaaatcctgtgtacgcctcctcatcggcttgatcaatggcatcgcctcggttgttctttcggcgtgcggtcacggacttgggttgtcgtccctttggttttatggtaggtagagattcgccttcacttaaatcctcggtcttcggctgcacggggttggtctcgggtgatacaggcgttgggggaccctctaatctggtcttctcgacgtcatctgcaggaggctcctctttgactttggcctgatttgaccgtttaggggggcggccaggccggcgcttctgaccctcggggcggatagacggggcccgtggtgtcggggccgcacggttcacgcgttcttggtttcggcgtctctctcctcggcgagccgggggttggtggctgctttcttcacatagacccttccactgaggaaggttgtacgagcgttggcgttcgatgttggcttgggtgtatgtaccgtgggatccgtggaactcttgcatgatgggattcttcactcggattttcttgactgcctcatccagcggtggaagagagtcggaccttgaaaagtacaaagtcatgagcacagccatccacattggtcttcatttgatcgactcaccattctttcggaggaatgactttcacgatgcctgcctgcattccatatttattgattttgttgatgaagccctggaagtctcggaattggtccatcgtctaaaacaataccacagtcagcctggctctggaggtataggcgttactgcccagtctcacacaactgggagatctccaacccttggtcatcgagcaggagggcagtggcgtggaactcaccggcttgaaaacagggaccttgccgtcgccatagtaatgatcaggctcaatttcttcaatttcctcaaccttctcctccacttcttcctgcttgatcttagatgtatcgggtgccggggcagattggtggtcaagctcgagatccgataactcggagggcactccttcaggcgcttcctttttgccgttggcactctgcggcggagtgatggagatttcgacgacaggttcgcctccgagcgagtcgcgctgcgactgatcgagtactgtcgccatcatcgagggcgatagaggaatgtttgggaaacggtacagcgtatgagttgccgtcgtcggatagtgcgaccgctgatcgacggcgtgaagggagtatttcccagcggtcggggaaatgggaacaagcgctgcgaccgagcgaaaggaagcgcgaaattgttggggtcaagggcaccagtattggtgtgttgagggtggtcgacacactccttgagtgtacagagtacaacggaggtaggtagttgaaacgattgcgataagctagctcttcgcgggtggttgtttttgcctaaactgaacagaaaggcgaactgttttagtcaggtcaccagtgaaagactgaaatttgtgagacaggaagttgtagtgtaggcagaggaaacccttgtacggagtagcaaaggcagcgctaggttctccatgaaaaaggtagagaagtgcagcaataccagaaatagaccaatcatgcaggtgccggcgacgcttgaaggtggagtgcacgatgggctgatactggaaggaggcaggggcaggtgggcacagggtgaggaatgatgggcttgaaattggacaaatcagagcgctaatatgggaagggtgggaatcgtccgatcagagagcaaagtggacttcggggcgactttggcctgggcgcctaggagccgcgaaatgattcgtaccgtatccggtctcggacgggtaaaaggattgccaggtctcaggggagtacaagttgatcgcaaacaaattcaaactcactaaatcactggaacggcagttaacgcctgcgaatccaaagaaatgcaaagaagcgcagaagcaaaggtggtatcacgatggtcaaaatagagcttggtcatagcaccttgaagctttcagtgatgggtcacgtgacaaggatgtaatttaagattatgtgatctccatgttctggatctgttattttaccgttatttactcaatttcgtactgtccaacaagtttggtattgtcacggatcatacaatgttcagccaatctcggataccatcggagccgagcgtttcctcccttgatgagatcagtgatcaacatcaagattaactgcatgtatacagtccaggacttatatcctagaacatatgggcagtataagttctagttattcttgcatcctctatttcttctatgttataagtgctgaattgtcttataacttggcgattttttctccgtatacggacggagtacatccatccatacttaggctagaactctctatattaatcaagcgagacctccgaggctggtatacaatctacactctctccgtaatatcttctagcattatcattacagggtaatctcatcttcttctcgccatgatcatatactaatccgggaaaataaaggtccggtcggatgaggctctagtggctagccagttcgttcactttatgtacctacatcatgcggtagataactatatgtgtctaccggggaaatatgacgtatattcagaagtgtacagcatacaatgtacaactcagacatgtactccgtacatcactttgtattatccatgtaaacaaaaatacataagagtggaccgtgttggtccttctttggaaattgaattgtagatctgtggatgcatgaacggtccgttgtcaggatctccaaaatctaatattagttagagcattgaggtcatcgaggcgcttggatcactctctgcatgatcacatccatgctgtatctatttgaaactattgcacccattcatcgaaaagctgggtatccaaattaatatatccatcgacaaccttcaatccccgcaggcgttcctgttcaatccgctcccaggtccactctgcgacatcccacgagtcagtattctccttctgctgcttatccagtgtctcctggctcggaatctgctcatcgtttatcttcaatacctcccgagccaacgatccatccacgcctcccatggccgtgataccttcaccactagcaggggtgccaacgtcggaagcttcggctgaggaattgacgtcggctagcgcggtcttgtcttcactcccggaggacggcgcgggaaggaatccgctagcgcgtagaagccgctccgggggaacagtcagccggcccttcttgaccacgtacttgctaagacccacagcaaggaccaccttttcgccgccactgtggcttgcaggtcgcatgaagcaggtcaagatgtacatccacttcgcatcccaagagatcaccttagagtgcatctcatatagttcgtatggcttgatctcgcgcttgaatgtgcagtaaacagatccgagtacaatcgacatcggcttgcgccttggcgctggctttccctctttcttgcttgcggctaggaactcctggtcgagctccttgctcacattgccgactccaggactgtaaagtcgggtcaccagcgttgtacgcgaaatgtccagatccgtgaagtaggtgctgttggatttgtgcaggttgtaatcggtctctagcaacggcgtgcgagatgtgaccatgcatggtacgaagatgggatgtgttggtttgcctcgggagtccacaatgagtctccccttggggaaaagtggcgcactgggtttcaaacgtaggttgcttacgaagtgatacagcaaacggaactgttgactcggtcagtagtgcaacataccatggggggaggtcaattccagaaagtcaaatttgacagtcgaacaagggcaaggaacacttacgtgccaagataatgggagacttttcaagttagtcactgcaagaagcaaggccaggtttctccatgaggcgagcgccaatacgcctgctagtatctcgcgtgtatactccatgatgaccccgggaaatttcaaccaacacagaagagaacgtctgatagcttcatacaggtacactagacaaggcttgactaggatatactccggttcatagatgtctcgggagatgagagactttggatcaggcagacttcaccaaacgcaattaaagagagacagaataatgtataaaaaggaatgaaatggtggacccaagttcacctgaattgatgagtccgaaagccgagcctgccgatatcgtgaattccccttcggaagccgaggccgaaacttgtgcacgtgatatcgtgattactcattctctcagtgcgcacgctctttcccagacaacccaggtgcccagaatctgccaaatgtcaataggttttcgaagccgtttatgggtgaaaacggcaggaacaagccaattaccctccaccgacaatagtcccgcagaaggagctcaccatgcaagcatcgggggaaatagtcaaagcttacaagcattggatccgagaattatgctaacaccatgacttgaccagacgttccctaccattccatcctcgcacagttctttacgaaccgaaagtcccatcccgtcgtttactctacgacgttgtcctgccgcgtcgccgcacgcgaagcctagctgcgagagcttcatggccggggtttgggttcgtcaggaatcgtgctaggatgaaacaatgttagacaacgtttggtcgagtcatagtattagcataactctcagatcctggttgcatggtgggctgatctatggattccaataatgctacccaggacctggtttggcctaggaatagttattgttgataagaagtagttgatgtttgaataattgtatagttctaatgcacagaatagggcctgaacgtatcgcagctgctcattggtcgaacaatcatgcattcatcaaataatatcaaggcgttcaccacactacattcaaagatctatgattcgaccttttgaagtttgttgaatttatactttcccgcttggaataagcttcattaagggaaacactcggacttgaaaaagaagggaagatactgatatgttacagcactatctgtatgatttgggtcgaatgttgttccaactatgggacaaggttatgccattttcacgcatagtaaatcaacacacaaaggaccagcgaccacataagaaggaccggtacctgaccataagccgtggaaggttgatttataggcacccttgacaatagaaatagcactcgagcatcgaatagtactctggctcattgtgatcccatactaacaatggggagggagtagcgaaaaggcaatatgttgctacactcaactttgttttgactggtttgcgctcaagttgagatacaacgcatgttttcaagtcacaacattggtctttataccttttcattaactcttctcaaatttctccattgccttccaggtaaccttaacctcaacctcaacctttctgttattgatcgttagcaaatctgaccaacacctcgtgtgtaggcacttttaatttcaaacttccttcctaggtccaaaataacataaactcttcgtttcctcctttctcctgctcgtctctggcaacgcctgtcaacaccaaaaagccttgagactgttcatcatgtcggacgatatcaccctcgcaggttatcttttcgaacgccttcatcaagttggcctacacgccgtgcatggcgtccccggaaaccataatatcggaatactgagagaagccactgatgcggcgcttggatgtgtcacacaccgtagcgatcttagtgtcggacttgtcgcagatggatatgcacgggtcaagggtatcgccgctgtgatatcttcattcgagaatatgtcaccgtcggtcccgacggcaatcgctgcctcgtaccgggatagaattccagttgtgcttgtgattggtacacccgaacgaaaggtgcaagcgcaggcttccaaattccaccattcattcttcgacgcgcagcctaatgttcctcgtcagcctgatgtctttcaaacactcgctgactgcttcgacaaaattaccattacccaggagtttcttgttcaccctagcgaggcgactgctcagattgatactgccattcgaggatgtatcatgcagtctctgcctgtttatatcgaactgccggaagatttggtcggcagtatggtaccggtgaagggactcgttcagcgcctggacttcaacgctccgccccacgatgctgagatcgaacaaacggtagtggccagtatcatgaacaagattaggcacgcacaacgaccggtgattctcgtggatgcgggtgttccatcttgtggtcttaccaaggaagcaagccagctggcgaaaaagactaggtttccaactgctgcgacccagttcagcagaggtgttgtagatgaaacactcaaaaacttccatggggatatctcggatttcgacatgtacggttcatacttcagatcgtctgacctgattctccttattggacctctgaataccactaagtgggctgctcccgccgtgttcgaggcgaagacagcagaaaccgtcacattcaatagaaattccgttgtcattggggaccaaagttatgagctcttctctagacctgtgcttcagcggattctagactgcctgactgagaggaaactgcgtgatcttgcgccctaccccaatttacccaatgtccgcgacagcattgaaatgctcccaagtcagagaaatactgcattacttcagcatgacatttattccaccttttggcgacggatgtctctttttttccgtccgggtgatattatcttgactgaaacccaaacagctcaggatggagcacgctcatttgttttgccgcgtgatacaaccataatcaatcctggtatcaggaagttcgccggacacatgcttgctaccaccttgggtgtcgcttcggcaaaacaaggccttgccaaagcaacctgccggctttcgcacggacgaacagttctctttgaaggagccaagggtttccaagagggccgaaatgacctcagagccatcatcgataacaagctcaatgccatcatattcgtgatcaacgaaggagaacccatcgttgaaaggctaatgcacgcaatggagtaccgccagcaggattctggtcactggagatacgcagaatccgtttctttctttggagccccaaatgtgacatcttacccggtctcttccaccatagccagaacatggggcgacattgacatcattttccatgatgagatggttcaatccgggacagggctgcacgttgtggatgtcatggtcagacccggagatccaaatcaaagcccgtgtattctcacggagatatatggcccacccccgagcccgtttaccttgaagaagcatcacatcaagcaagattgatcgccgcgaagtgagattggaaagacatttgggctctgaaacatgcaagattagacaagtcacaagatactttacaatatgatgttcatttatcataattgcgcccgcaaaacatagagaatgttaaaacaaaatagacagacacgtacgtatacagaaataggtgatatcatcctgaatccgctctatatgataaaatccaaccaccatctagttatgctgacaactctcgcaccatagcccatatagtaaactcctccaacgaatcccagaaccccttaggacgcctttggctaccaacaacagtgaacccctgttttagccagtagccaccagtgtcctctttattaacccgagtcataattcgtagcggagacgacacatcctttccattgacccgatgccgacgcaagatctcttcttcacacgccctcacaagatgaccagcaatacccctgccgcggtattgtggacctggggggagagcaacaacagcaagctcatagtcgccgggacaagcctgtcggtgcaacatttgatcgacacatcgagtattggcagcgtcttcatgcccgtttttagttgtaggcatccaaaggccgtcgtctttccatttctttatacttgcggtcccgaccaatttgggtgtttgatcttcggcatcttcaataaatgccaccgcggtgaatccgtctgcaccaagctcttcggacagtgcggagtcggtatgaagtctggtcttatttgtggaaaactttattttggcagtgtggctgacacggtagctggcgttcaccatggacgtaaaatctgagatccagggttgattgggaagagctgatgatgcatagaccttgatgtggaagtccattttgggatccatgtttggacctggaaagtttggtgagatccaggatgaactaaatataagaagatatcttgtttatcccaggaaatttctacaatttccaatgtggggttgaacaccgacacggagctaataatgagtcacagaaacctacctcgggaggttatctaaattctagccgacatgataacaaatgtctttgaaatgcaagtcccgaaaataaagatgatttcttaagctgtttggtctgtagatacggactagtgctattgaattcgctgttgtggaagtagacaaggggcatcggtgggataggaatggcccaaccacaatcatgggggcccgcaagtcagagaaacttagagcacatactgttgagagtgagtatatagtttcaaaatgaaagttgtagtaagagctcaccggaatgaagaggcttggaacctgcctctcatactcatcccatgtcttcccatacttgtttttacatttggtgatatccctcatggctcggtggccgatcatgaccgcgaagaagacagggtagaaccagggaagggggctgtcgaacccggtgattagggcccacgacaaagcgaaaaacatatcgcaactgtaatggatcttgcgagccaatcggtaccacccatcaacgaaaatggtatcgccgtcgtctgtcacaagtgtctttggattgttaacgtggcgccaaggaagctgggggaaggtattgcgcgtaaccattttgcctcgctccatcatgcggaaggcgttcttctggctgtttgcagtgtcccagacccagtagacgcaaagatatgacacaaacaataccgccaatgcatttttgttccatgcatatgttgacgggtgacgattagccaggtacagaacgcagtggcaatatgacatagggacgccagccatgttccagaagatcaacaagaatcccagtttctcctggtacatgtcccatgttgtggtgatgaggtgctctgccttggcgcaggcattggcgtaaaggaagtgtgccatgacaaggaacataacttcaccggagacatagccgtagagttcatattggcgagtggcagctgcgcagctcagacccaagagcatgaaccatgggatacggacttcgtagaacatcttaaagtccaggatcccgaacatgcgtgggttgagttctgctcccatgaaaaaatcatagattgggtaaccagtgatgcggtgctgggtacctcgagcaaatgcagagaaataagcgaaaaagctggcgagaaacccggacaaaatcgccacggacatcagaggaccgaaatcatctaggatagtgtagattgggaacattccagtgtagtgcagagcagccatgacaaccattgtgaagtacaagctactgtaagcggagcaataatactccagctgcttgcctttcaaatggcgaagaggcttcccataacacgtgaacccaggcatgaagatgtagcatgctgcctcgaagatgtagaatgtccagtagatgcgccacgccctaaagtgcggaaacgcaccgatgtaaacaaggtgacacagatgctttccgaagtccgcccaggactgtccgttttgcggcagaggtagtttcccgtcatagtaggtagcaccgatccacatgtaccacatcagcaatgggaagccaatcataagtgccaagttaccgagtgagccaccgaattcgaattcatctgagtagtccactttggtgtccatgccgggtatccatccaccagcgagttgcgcttgcttgaagtcagcgcgcgaatttggcttgtcaacaacccgagggttgccatcctttgaagacttgacttggtcatccatcttgagaacttgagactattgtattaattgaattgatggaaaccaaggaattgacgccaacaaagtacactcacagtcaaaaaatggtccgcgctgatacaggagaaaggagaaggagaaaggggaggaggaaaaagaaaggaaagggacgagaaaggatgaaagaaacaggaaggaccaaagggaccgagtattgttagttaaccttgggaacctcgaacctgagaagtcaggccaacgcaatgatacagttcccgtttgggtttagaccccgccgtctttatcccaattaggattagaccccgctactagcgttacttggaaatagtgctttggttgtattattgcatttccaaggctcctacttgtttcatagctcagataattgggcagtacgaaacactctacacttgacctggggatacataatagcgccatcactagcgcttgataatttctagcttggttgtcatgagagctgctcgctagctttttttttgattagcctcaatactgatagagtaaacctcctaagcctccgacaacctgttcgttctcgatgctgttagactttttccgtatatctattagttcaatagaatgcaatggcaatgacggatacctagccaatacatacatgtaggtatgatgtgacgtcaggtgatcttatcgcggattcgcattaatcagcgactcttatcaacccgccagtcccccgagattggacttctctccgaagattcacctcgctatgactgatcggtcggtcccatgaattatcagaccatcagtatggacggcaatgtccccgaacagcgtcagcgcactgtgggagggccgtccctggatcagccgcccacagatcctatcgctgatcccgcgcaagctcgcgccacatcccctcagagcttcactccacgctcacttctcgtcggtcttattattggtgctctcatcacattctcgaatacctatttcggcttgcagacaggatggatcagcacaatggcaatgccctcggccttgattggcttttcggtcttcaaggttctatccaagcacctgtctttccccttcacaccggttgagaatgtcttgatacaaacggttgccggtgcagtgggaactatgccccttggatgcggatttgttggcgttatccctgccctggagtttctgttgaagcctggcgaagatggacccgaaggcgatggcggagaaggcgaaggaggtcctttgaaactcggtttctggaagttggttatctggagtctgggagtctgtctcttcggggtggtgtttgcggtcccactacgaaaagcggtcatcgtccgagagaagctgcgatttccgagtggtactgcctcggcgttgatgctcaaggtcttgcatagttctggtagcgaggaaaaggttatagcaccagaaagttcccgtgcgggtatttttaacacggaggccgaaacagctggtccatcccaagaagacacaggcctcttgaaggatggcgatgctgaagaccaagcttccaaggagcaaaattggcgctcgaagatgcgcatcttacttggatcgtttacagtatcgggtgcatatgtgaatatctccaactggactctgcaaagttcatgctaactcaattagactcttttctcctacttcgtccctctagtccgtgccatccctctgtttggcgtgggcatggcggataactggctgtggaccctcaacccgtcgccagcatatatcggccagggcatcattatgggtccatcaacgtgcatgcacatgcttttcggggcagtcttggggtggggcgttctatcaccgttggctaagagccgcggctgggctcccggcccggttaataactgggaagatggcagcaaagcatggattgtctggatatcgctagccattatgcttgccgattcacttgttagtcttgggtggctggtgctcaggcccatcctgaagtactctccaagatggatagcctattttcgatccactcgtgctggtcagtggattgcactccgactacattcttctcagcactcatatatcaactactccgctttggagccagagcctcatcttttggctcatgaagatgtcgcccaacatacactagtaactgcaaacgaagaggataaggatgatgcaccgccatctgaactcatctcaactcgaacagtagtgattctccttcctttgactctcctcttgaatgtcgcatgcatgcactttgtctttggggacatcatttccccctttctgtcgacattggcaactctgctggcagtactactgtctattatgggtgtccgggctctcggcgagaccgacctcaacccagtttcgggtatcagcaagctgacacaacttctcttttcactcgccacgccagcatcccatttctccagacgcaccgcattagtgacgaacctgcttgcgggtgcagtctccgagtcaggagctctgcaagccggtgatatgatgcaagatttaaagaccggtcatctactcggcgcaagccccaaggcccagttctatggccagataatcggcagtcttgtgggtgcagttctatcaactgccgtatacaaattatacgtgaacgtatatgagatcccgggcgaaatgttccagacacctaccgcgtatgtctggatcttcactgctcgccttgtgaccggtcaagggctgcccaaaatggctggacaagtctctgtcattgctggtatcgtgtgggcattccttaccgccttgaggatcgtagctgcgtcccctgcctttgcacgcaacgggaaaccccctccttggagatgttggatccccggcggtatcgctgttgccgttggtatctttaacgagccttcctttaccctggcgagagccatcggtggtatcattgcatggtggtggtcgcggaggcactctgaatcgctcaaccaacaagtggacagcggaaacgccactactatgggatcgtctctggagactgaattacaggatgcgcagcgatcatcaatatcagccgaacaggcatctgaaaaagcagatgccgcctcctcgactgtcgtcgttcttgcctccggcctcattttgggtgaaggtatcatgagcattgtgaatcttcttcttgcaagtgggcgcgttccacatctctgatcaggagagatacgagaaaatgctcccatcggcatgattttttattatcaaaagcacgtattgtatttagagattatgttttgaacgatattagatgaatgtcaggtcatttttcgcggcctttaatgatttccaatctactgccacttcctggaatcgcctgtctcatattgttgctgacttcaaattggtcccgactacacgtgcagtaaaaatataggaaaggcatgtgctaacaagccatgtcaagaaaacagcaatcttggtctcagggtcttaatacccttttagttgatcgtatcccaatttaataacaagatctctaccaagtcccccagccccagccccagccccagccccccgcaccccggggaaaagcttgatgcttcactttcccctgcaccaattcggattaccaagcagaatccactccatggacctaactagttatctccgagacgtgaggacactaaattttcaaatggcgctctccgcaatcctgtcctggagggatcggcctgctccgacatcggcttcggcatcaatatcgatttgccgaagcaacatctacctagcacggagtactccgtactagagatggatttttctccatgagactagcaaacatcactctacggtattgatcccaatcatgccacgcatatggtcgaagggcagttttgtaatacaagtcgagcccgagaaggatcctgcatctcttgatccagcatacctcgtcaagtgggatcaggacgatgtattgaatcctcaaaattggactccccggtacaaatggtgggtgacatttcaactgggcatgcttgctttggcgggtagtctagggtcaagcatcaccacgccggccgatgacaccatcgcgaggtatactggcgtgagcagcgaggctgccgtgttggatgtgtcgctgtatctgtgagtgggattgcaaaaaaacaccaaatacaatgctaatagtaatgccagccttggcttcgtcttcggacctatcatctgggcccccctttcagaaatctggggccgaagagtcagcatactccccgccgtcttttgtctagcactattctccatcggcactggcgtaagcagagatgcagcctcggtgttcgtcacgcgctttttcgcaggcttcttcggctctgccccgattagcaacgtcaccgctgcactaggtgatatatggagtaaagagacgcgcgggaccgcagtcagcctctatgcagtggccgtgaatggcggcccggcattaggtccagtgatcggtgcagccatactgttgaatccgaatatgggctggcgctggaccgcgtacatccacgcaatctgggtctttgtcattttcaccttgaccttcttctgtctgccagaggtatacccgctagtgctactcaagcgcaaagcacaacagcttcggaaggacaccaatgactcgaggtactatcatccccatgagcatttgaaactcgatgtcaaatccgttgtcacgaagcagctcgctcgcccattgagaatgctggtcactgagccgattgtcacctgcattgccttctatgcttccttcgtctacggcgtcatgtacctaacccttgaggtatttccaatcgcgttccagcaatctcgaggttggaaccgcgttgttggctctttgccgttcctgggattgttgattggcgtcatatcatcggtaggtctcaatatctggaaccaataccgctataaccagatatccaaggaggcgaatgggaaagcagtacctgaagcacgacttccgcctatggcattcggggcggtattctttgtcgtcggactcttctggtttgcttggaccgctgaacctcctcaccactggatcctgccatgtctggcagccgtatttattggcattggattcaactgcattttccaacagtgtttgaattttttgattgatgtgtataagctctacgctgctagctcaacggcagctgtcacttttctgagaagcttgctggctgccgggcttcccttggcggctaaaccgatgatcagggctttggggattggtcctgctgtttctattatcggagctgtggctgcggctctattgccagtaccctttttgtttatgaagtatggcccaaagctgcgagggttatcaaagcttgcgcctgaggattcttaggattgttgataattatagaatagatggctagatggtattccacttttatcccttttctaatactggtaatagctagtcacaccggtcaaatcgcatatagtctcgtggttattgactgcaaatttatatattcctttgtcttcaaggtcatgtccaaaaaccccaaaacacccttaaacatgatgcaaatccccaaacaatacttacaagcaattcaatcatcgccggcagtttctggttgatcatctgagttagcaataatgggttcgatctcgaatcttatctgaactctatagacccaattccaaatgactactcgggcgatacgtctcgtacctctagggagagatgatataagaagtatggcagctgcttttcctaatttcgtgccgagaagttcctcatactcagcagtgccacgttcgaccttcatgcacgactcgtgcatcgcagcttcgaaatcgcgtccaagtctgggatagagtatccgcctgatatacggtccagtctcatcattgacgacgtgggtaaacataatatacctcaaagtggacatggggtggtcatactcataaacagccttggcgaattcattccactggatgttatcgtacctaaaaatggaatcagcaacaagcagccccgggccgactagatgtgtatagctattactcagacttgggaagttgaatctcgctagggtctctgggttcagaacattgttaaaaaacgctgtatgtcggtacctgtttccctcggtagggaggcccgtcgactcgggttcgcctccgtccataaggtcgcccagatctcggtgatagctttctccgagttcaaaaacgtctggcggcggggcgttcatcaagtcgtctagagttgctgttgccggggcaatattgcagtctggttcgttagggtcttctaaccaagcttgtagttgagctcctttttctcggtaccggttgattgtcgttgtagaaggcttttcatacatctcatcgtctgtgttgaagtcttcggaatcactggaggcggcaatatttggagaagtgggtggttctggaaacaatagttccggtccccaaaaccgtccttcagtcgaactctccccactggtgcgctgacgcttcgaggggggagaaccgtgagagctaggagctgggctccattcctgatttacatcctcaacctcttcgacgtgcccccgcttcctaccgctataggattgcatgctgtcgttggaggatctcaggctccatcgttcgattcggccagactggtgcgcggccctcaaggatatgggagcacggggacgcggagaaccgaagtacaaggcatcatcatcatcagatgaagactcactttcacctgcattggataaggtacgtctattctgtgacattcgggctagagggtaggtcaataattcgccgggatcggcatctggcatatcaatatcactgtcagatctggggggagagggattgtcacttattctaccatcactggcatcgttcatatcgatatcactcatgtcaggtgtaatttctgtgcgagaattgccatcattgtcggtggcggcttcctgaggtttagccttgttcttaggctcagctggcttagggtctttacctggctttggggctttggctgtcacatttttagggtaagtcattgtagaaggtgcattatgcccgcctctaggtgccgtttttggtaggggcagtgtttggccatcggaatccgagtcatcactgcagtcgcagcggcggccccagcatttgaggctgtggcagaaacgcttcattgttatggttgagttaagctatacgtcgaacaattggattgatagagaagttgaatttatatgatgttggatctgttgtattgtacttgctggacgatgctagaatggagagcaacagagagatacaggcgaagctatatacttttgccaacgtctctgtttttgctcaacatgggtctgcctgctaacccacgagcgttgaagcattactaaaataggttcacctcaaatagaaccgcttagaacaaaaggagtagcagttcaaacaatggagacaagtgcatagagaggagtttcaaccgccaagacaaagagactcgaacttaagttgacaataaggacgactaatttgggaaagccaaggatagaacaaggaacggacaaagaggagtcgaacaatgtaatgttcgtctaagaaataaagagcgagctactatctaccaaggccgtcaacaatgtaatctgctattctcgaatatccaagcgataaacatagtacattgttaaagacaagcaaagatcaatattaagttgctctccaaaggacgaataagcaatatatgacctatctctagatctatactcatgaatattcttgtttgaccaagtccggagacacggatcaacaggtacgagagtcaggccatatcagaagtttagcctgaataactcggatcgggcagatttattaaaatgatcgaatatcggatgtgtatctatttaggcaagccgtacgtgtagtatgccgggtgccgctgacgtccttaatatattaatctatggcccagccggtatccgagggctgaaattccttggagttcttgagacctacgtatgtaccagataatccctggcactcgagacctttccctttcccttttagtactcacctcttgccgctttttgatcactgagtaaaaatgagcacgtccctgagtaccctaacttgatcacgggctattatatgccagaatctcggatgaatactgttatttttcatccctgatacagctaggtcacgtgattgaccaggctggtttttcgcccgaaaaacacccttttcttttcttttatttgttttgatcactaagttgtctatcagattgtcatgttttaggactattattagttttagagagttagagaatttattgagatttttcctgctatatatacactcgccttaccaccgttttcccgtcaagttccaatattctatttcactatcgatatcaattctattcatatagtgtttctgaaaagggctagctaaggtcctagcacggaatgcgacgatatattaattcaagttctcaattttcgcattttgatcttctgtcagagttttccattctttagcgtccttcaaatgttccaacctatgaatcctctggtccacaagggcattcactcgccagcgatcctgtgttcccttcctcttctggcaacacctcggcacagcaagcaccttcttcccaataaactcagtcggatctactgcaaatgaaagccatgtatttgcataaataccattattatcctcaatgtcaatgatgttaatctgtaagacctcggggttgatatcgtcggctgggacaagatggtcaaatgtaattccatagtaatcaatcatcctacttaaattaagaggagagaactgattagccatagggccatcagagctcgttgcctccactaggagagattgacttactcctccggacgcttctccgacatccagcccaggtattcatcctgcactaccatgtccccagcgatacccgggacttccggataaacatcccgtctgtagattgtctgatacgttaaccgtgctagctctgggcctgctggctgtgggaatgttcggtctccaaactccagacgccaatggatatgtggtaggagtctttgtatggcgattaggggaccttcgatttggattctgagcggctgatcagatggtgggaggtgataccggccggcgggtgtgtgaatacaatgaggaatgtaaagtgggagcgccatagatgagaccacttgattgctggagttgattgaggaggcgcagtgactaaacccgttagtgagtgtaatcttggaaagagagggcactagattaggttcgactagcttttttatatgcctagggaagagaactacgatatctcggggcttatcatatgacttggatccaatatcttcggctattaaaaccttcgaagaagtatggcgctgatgtaccgattaatacgccgctgcctggccgtgccaaccaaccaattaatttatacctgatggacgaagcgcttcgctctgttttcctataggactatttccccctgcaaataattactgatagaaatctaggtatggcgagcgtacgggtaaaagtcataatggtagaattctttaactaacaaaataaaaaacggtccttaatgaaaattagtgcggacaaaattatgaagcaaaaatatacacctatgtacttttccggtcctaatattctctggtaaaaagacttggtaattagcatttgaacgcactacctcagttcttgataattacccctgagtgtgacgtaccctggttgatttcactctgttctgatcccgccccctgtgactggctgtgtatgcgctgactgaatgtgcaccctaggcgctactttatatggtaaaaactctcgcgttgtattgccccagaccaatcgcatgtactggctatttcgagctgggattactcggatatcacatggcgtcatttgagaataatggttgcggcggcatcccatacaggcgaattggttggctggcgttaaggtaacactcacggcaagccgcgtgttatgttagtgcgaagtggttagttgcctgtataccattttaaggcgaccctctggtgctaaggatagaggtattggcctctatcctctgccagccttatccaatcccctgcttccgctattctggaggccgtgtcattggtatcatgcctgctcgaggtgactattattactcagccttatggagatcagttctcactgatgtgcctgggtcttttaactgatcctgacctgaaatcgcggggagaacctctgatagctcctaccccactgatggggtccttatctccgtctctatgtgcccggcgccaagaccgctcagccacgttaagtgatctcctggcctagggaaacagtctcgccccatgcatgcttgtgggccaacgatttgatgttgttggatgaacgcgcgggggaagtgaaacagtctagatgtcattttatggcatcaacctagtttgagaaatggtggattatggaagatatcatcctaattacgcgccgaagacctgatggcctctggtccgtcgataaatatcacctgccatctatcctctggagcccagctttatttctcatttcactttctactactgttccatccctgccacacttgcacccctcttgtcaccttagcacaccaccgtatgtacctccgataacctgccatgcctatatatggtttccattgcatgcgccgtgccgctaaatatgtgtgacatttacactgactactgggaatgtggtcatatctatctcgtgcgcgagcatccttgcccccgcgttggccgttgcgtccgccttatcaccgtgtggggataactaagcctggaaactgtggtgctggaggctgcatgactcccccgtcttctgactagactctccgtcgtggccgttgatcatctcactgcctgactgctctgccgccctctctatcctgtttcccgtctctcgtccgcctcctgtggctgtgggcccgcgcaccttggcccatcccaactgggacggggaactctttaggactggctgtgactggcttgattacacagtctggttcatgtgagctctattgtgattgatctactgtctactgtctgtctcgctgttcctacgttctttcttgtggcttttttcctacttttctgtctcttactttatctgtattttgctggagggatatgtttgacttggggtgctggtttctgtgttgcccggcttattttgtgctgatttggattctgcgaagtgtattatagctattagcatgagctataagaccacactcatttctcagaaatcatcatacagtaggtacaccacgacatgcatgcttaataggcatgaagaagatttctcttattcctggtgatacttcgttattagttgctgcgagctcgtacatttttatttcttagtcagtttaagtattttttttcctacataataaatgtaacgtgatcatttacccccaccattgtcgtcccgaagggtttgcagggtttacactaccttatggcctcagacacggggggttgagtgcatcggtattactcactgattagatagttactgagtatcactgagcacttactggcatcagtcattctgcacgtgactggattgagcatgatcactgatctgagtccatgctgacatctactcagtgagcctgagcctgagcaccctcataaaagcggcggcagatcaaataggaaagccccacccgccagggaaaatccggtacgtatagttacatgttgaagaggggacccctgaggggcaccgacagccctgcctgcgaaacaggtgtgagagcagagtcgtcactgggagtagtagggtgctagagaggagaacaccatggggtgactactgagaagagaggtggaaaggtgtctgcgttgctatctaggcctcgggagtgcttttatgtcacatagccacttagtcatcctgctctggaaacccccactgcaatgtatacattgtagatattaattgtttatttccccaggtgtggtgccggaatatttattcccctctgagcctcgaagattgcctttgcatcatcgtactttcaatgtaacattttccattcactcgggtccatgcggcgttttgggcgtgtttggcgcatgtcataacaaagaccggggtgctcttagttagtctgttctcattggcccagactactcgctttgagggcatcccgtctcatttgctgccgggaggttgcatcggtcttggctggcttggccatgtcttgcgctatccaaccgaatccgttttctacactccataatatatcggcagtggcagtgtgaggagtataatgagtagatgttcggatcaaatcggaatgagaaagaaaccacctgcaaatacaccaaatatggcaatatcagcacgttgctttgggttgcgccataacaagccatgccgctacgcgatgactccctgtacttatttcctcgacaaagcggtaaattccagaaagtactgaatgtatagagttagcgctgaattcgtctgaccagtcacaatccagagaagacgcccccaactcctttccccatgaaacttccctcatccccgcgtcgtccgacgccttccccgtatcttggccagccccagacattggagatccccccggtcacctcggattaccgcttttgtgaatccggaggaattgaaagtggcctatataacccgctgatcggcattcccatcatgtctgtaatttgcgatcttctcaggtgtgggcatcatgttcggcattccgaagttctttggctggagaggccggtctctcaacctggctatcagttcccttggtagtctggacttcttgtatgatacaattcaattattattctgaaactggcaactaacctataaggctatttggttacgatcaaggtgtcacgggtggtctgctagacctgccctcattcatcaaatacttccccgatatcaacccactagatccagccatcgccgataacaagcccctccgatcgcagcgcagtctgaaccaaggcattgcagtcgcatcgtacaatctaggatgtttcttcggcgccgtcttgactatcttcatcggtaatccgctgggtcgacggaggactatcttctgtggctgtatgatcatggcgactggcgccctattgcaatgcaccgcgtattccctaccccatttcattgtcggccggattgtcactggtgttggcaatggcatgaatacaagtaccgtacccacctggcagtccgagtcagccaaggcccacgatcgtggcaagatggtgatgatcgagggtatgctcatcacgggcggtattactcttagctactggatcaactatggtgagttggacccagtatgtatgtgacgatcaagtcgcaattactgatataatcctgaattaggcatgtcgttcatcggagaaaaagaggtcgcttggcgattccctctagctttccagattatcttcgctatcattatcttctgctctatcctcaatctgcccgagtccccaagatggcttgtcatgcaaggccggaccgatgaggctttggagatccttgaatgtctgaatgagaaaacgcgggatgacccctacatcaagaacgagctcatcgccatcgaggaaaccgtcaaagaaatgaacaagggctcttatagaagtctgttcaagatgagcgagtatcgagaattccatcgcgtggcactggcctacgtcaaccagatgttccagcagatttctggaattaatctcatcacctattacgtgagatcccctctctcaaccgagatgctatcctagccctatactaatcaagtccactaggcaccttcactgtacgccgagatcggtcttggaagcggcaacctcccaaagttactagcagcctgtaacggcacagagtatctaatggcagcatttatcccgattttcatcatcgagaaagtcggccgtcgtccactgatgctaatcggcgtatgtcactcccccaaactccgtgcctatccatatcccatcagctaacaagtacttatcaggccgccggcatgtccctttcaatggccattctagccggcactaactaccgcctaaccgtcctcaacgacagccgcgccggcatcggacaagcggtcttcctcttcgtcttcaacaccttcttcgccatcggctggctgggaatgacctggctgtacccagcggaaatcgtgcctctgcgcatccgcgctccaacaaacgcactagccaccagcgcgaactggatcttcaactttatggtcgtgatgatcacgcctgttgcgttcgagaatatcggatacaagacctatgtcatcttcgctgttatgtaagatacgatcctatcctccccattaacccattgagccatgacttggaactgacaatagcagaaacgcattcatgttcccctgtgtgtacttcttcttccctgagacccgctaccggtcccttgaagagatggacgctatcttcaagaagtcttctaatgtcttcgatgtcgttactatctccgttaaggagccttatcgctatgataagcatggcgagctcaaacctgagtacctggaggaggctacccgccatgcgagcactgatgtgcacatcgccggtgcgaagtttgacagcgatgagagcggtcatgaggtcaaggcttgagtggttggaagatgtggttggttgtgatgttggtggatttcatttatacccgttgtgccagtgtgatttgatgctagtatcatttcactgagaatgttttatacatggcttttagatgtaaagagatgttaataacagactttctgcgtcgaattttgattaaaagtcatagatgtggagagagatatatataatatgcagactagcaaagcattaacggaaggacgtctatgaaaacggtaaactcgtcagtaaattctacatagctatgaatataaactatctgtgttggaacaagtttgaaggtccgggtataccagctcatctcagcgtgacacgcattttattcgagatcgatgtcaatgaaggaactcgaggaagatgcttgtaacttcgaatcgaagagaaacaataataaaaaagggtgtgtaagacccgaatgaaaaatgaggcaaaagaaagaaaggtaggtatgagaatacggcatctaagacacggacgaaagaaaaaaaaaagacagatgatatgattcagatgcggaaatatgcatccagcgcaaagcacagattcaaggagggttcgttcatcacggacgcgggctatagggatatcaagatcgaggcgaacagtgtggtcatattaggcatgctcatttccgtccagcggggccactgacacggcagcgagaatgcctatgttctgcataatatgtaggcttcctgcaagggtgaggtcattcagactaagcgtcccgggtagggaggggttttcgcgagattgagccggacggagaagtcggcactgaagtcggaagggctggaagctcgctggtgggagcaggggtaggtgcggctgatgggcttgacggtgaaggtgcagcgggagcaggctcaggagcggctggggaagtcaaaacctgcagtgcggcgggagcgggagcgggagcaggggcagcggccggagcaggggcaggggcaggggcaggggcaggggccggagcagggaccggagcagggattgcagcaggggctggagcaggaacagccacaggactcgaaacttgtggcacggcaggagcggtagcggctaatgggctcgaaacggcaggcgcagcaggaacagcagcagctaatggggtcgaaactgcaagcgcagcaggaacggcagcagctaatggactcgaaactgtaggcgcagcgggcactgccataggtggagcgacattgccggcgctattgctacgttggcgttggttgaccggcatcactgggcgctgcattcctggtccgtatggaccagggctcatcgaacgcgggccgggccgggggccaggagacatggattgtgggacaggtcgtcctcctggtcctggagacatggagcgtgggacaggtcgtcctcctggcccgggagacagagagcggggaactggcgggaagttgacagcagttccgggggcagggtaagggcgagaaggtggaggcccagagaagccagcgccgggggatctcggacgggaatcctgaggatagaatctaggaccgggcggacccgcgggcatcattgggcgaccgtcagggcccatgatgggtggaccgcgagagccggggccaggaggtgggcgggcgcgaggcatcacaggacgagccgagaggcaagaccgtggggcaactccttgctgggcgccattaaggcgcgtacaaagagcccacccatcatcgtactcatgaaccaagcgcacaagcgctcccgcacgaagtccaagctcgtcatccatagaggggttgaaatccagttgcacacggtagacattggtagggggtggtgggccagcagccatggcgcctgcagctccggcggcaccggcactggtagcattggtaggggtggttgcagattgcgtcgaaccagtgggggaatggccgcgtgattcggcggaatggtagagctcggaatcattggatgctcgagatgaagcagcagcacctgctgcaacacccaccgctgcggcaccgaccgcggcagctgcgacggtcgatccggaaggttcagtcgatccgggcggtccagtggttggttgagaaggtccagtagtcgatccagatggttcagtggctgattcagcaaccgaaggcgcgtgctggctggcaggggcgttgaaaggattgaccgggtccctgaacgggtcagaaccactgccagcagatttcggcggggtaggaggcgccgagtcaccagtgagattacgagaggcgacggccgaaccagctgcagcacctgcaacagcagcggtggccgggctcaaatcggaagcagcagtggcggtcgggttcaaggcgccgccgctcagatcaggcgcgaattgagtgacgggacgaacattaagttgcgggggtgtcgaaagagcctgtggcttggaaggaggaggaggtggcaaagaagcagcggtaccctctggcaggccttcatcaccgaaggtcttctcattctcccgctgatatccctcttggcttctcttcttctttcgcataaagaagaaaaccagagcagcgattataccaacgccgaagatgacaccgatagccacaccagccttcgcgccaccagtcataccctcagaagtagtagttccaagagcggttgtcgaggccgatgcggcagagtctttggccgatccggtggaggttgcggtggaggttgccgcgaggagatcgttgacatcctgggaagtttccaaggtggaagaaccagaggtggacgacgccgaagtcacaaaggaggttgtcgtgatttgagcctccgactcactagtcgtggtggctgtctttttagtctcagtagtctcagtggtttctgatttagtgtcctgagtggtgtgggccacggtctctttggtggtggtcggttcctccttggacttggttgtggtcgcctcctcggtggttttggcctcggttgtttcttctttggtcgttgtttgttccttctttgtagtagccgcgctgacaggctcaccgacaccggcgtgcacctgcgtcgtagtagtgggttgggcaccggttacataacctcccacctcccctgtaaaatccggcgccacggtcttataaacaatcacgacatcgcctcgctcctcgatgacacctcgtgcctcaacagttccttgctcctctagttcctccacattgcgtgcatggttgtgatgcgcatggccgtgcatgttgtcggctccagtatcccaggatacgtggaggggtgagggttaaggaaggaggttcgcgtattactcctcacgagagggatacgcccagataccaggttgatttctgagtaaccgcgtctctgggtcgattccagctatgcggaatgtgggtagaaagaatggacgactgagatcgagcacagccgatagtcaagtcgagaataaaagaaaggacgtcgacttccaggtcagacaaattgaaagaacggatggaaacaaagttaaaagaagcaaagagaggaaagagaaaagcccacgccgcaatacgaggaagccctggggaaccacgaggagccgaaatgagatcttgggacccttgtgtgtatacaacaacacgctagcccaaacaggcagcgatgcacagacctttcctggtttgattggctgtcatacggtgcctggcccgaaggagttacctgacccacgggcgagcacccttgcagccccactttcctttaagtggctgtggtgtttccaaggtttggctttacgaactgtagaggacttttaaggagtcttgttctaactagtattttacatatatacggagttctttgtatatccctagagtatagttctgcttgaaatacccctaatctatctatgctgtagatcgtatatctaatttaccaacactataaaatacacgggaagtaacaaatgccgaccccatttgcccgcccccaagcggcacattcgctaaagtgtgaggcccagcacacgggccaggggtcacactactccatggttgtttcaccctagcacaacagccacatttaattgatcgctcacggaggccgtaatttccggtgtttgccggaaattcacttttaatcaattcaaattttaataatgatgcatgacacctttgcgccattctcatgcaggtccctcaggggttacgctgcacccccaaggttggggacacgtattgatattttggtacctgtatgtaagatacagattctgtacaacataggcagtactccttacttgagtaccgagtatttgcatgttatagtctatcaatagtggattgccaaacgtgattaattcgctgttgcaggttccacgcctgtcattcccagatccactcgtgcggtatcacccgaggaggcgcagaaactgtggcgtagctccttcaggtgtatcataccattgcttcaagtctgagcgaaatagggatgggcaagggcctaatttactgtcagatgttattataagacattaagtcaagttacatacctctgttgccgagagtcttgcgctgctctcgtagcacaataggtggctgactaaatcacggccattcgaggatgcaccaggcagaatatcctcccagctctgcgtcgggaacgagtagaattccactttcccccaatctggcagaacctggacttcctgttcaatggttattaacgacgtttccatttgccataggggtgatgcttaccggccagcgctgttcatccggagtacccagttgtttgaagatggagaaaatcagcgatagatcgctgcccacaggcccggagtcgaagagctgacggtgaccaacggcaatagcttctgccactacacagccggcagcccacatatcgagagctgtcccataccctttgaatccaaagagaatctctgggggtctatagcaggtcgtgccgacatccgtgattttctcggtgggcggctcagatcccgcatcgccttctttccatgagacgccaaagtcggccaaatacgctggtccgttgggggagtccatcaaaatattggaaggcttgatgtcccgatgaagtatgcccatgtcgtggatatgcgccagggcacggaatagatctcgcagaatcgatcgtgtttgagcagcagttaccatgtctcgccggagcaacttctcgaagtcatatcgcatgaaaggaaggaccatgacaaacctgccgccatcaagattaaatgtctcaatcaatggaattatattggcgtgcgccgcttcacgcaacaaacgtgcttcacggtgagcatcatggggggctgtcatcatgtagggaacagtgactttcactgccctaagggtcccgtcttccaactttgatttgtagatggtggagtgaataccatcaaagtggtggaaacaggaccgatattgaccgatcacttcccctgttgaggcctctggttcttcaaagtcattctcgtgctgtgggctgctgtcgacctgtttttcagaccctgccaattcagcttgatcaattgccttttggcagatagaatcatattcatcctaggtggattagtcccagttttcacgcccgtcccaaaaaggtacaccactcacttttgaagtggccttgtcatacgcctcggtttcagtttgcttggcttgggccatagcttctgcaaatgcggaggcaggcgaagaagaagctttctggtaagccgatgtactacacgcaaatcaatcgagtgtccatgttgatatagatgggaaagtcgcttacagagattgtatggctcgcagccggtctgtgaacccgaaattatccttccaagacatgatgtaagaacactgctaatcaaggtagtaacttctaccctactgccttgcagtttttatggcagtgtatagtcaataattaaagcaacgtaaatatagggaagatctattctatcacctgatgaagagctatcaaatgcaacctgaggcagcaaggcgccaacatcccgaggtcaaccgcgtggatgatgtcaagtgaccaatcaaggagtagttacagttttgtgacgtaagttacagacgctcaggccgttgttgatgatttaatactgccaaatactgtattacaattacaatctccgtcattccatccccattgccgtcttcggccaacatcgaatgacaccctaccaactgacactggcattcggtccccgcattcatttcccttacttgattgggcccttctcgactggaggaaacttttggttttctcttacatgttatgcgcttcgtgcgctaccttgctcagtacctcaataccccggaatctgaatcatggacctctcaaggcaagagtatccaacgctgctggtaagattgagcaagtcgagctacaaaattgacaagcaaagcatctagttactgatcgttgacggtgtctcttttatttaggctagcctgcatcccagccaagctacaaccgtcctgagcgatcgcatccgactcataaacaaggtcaacacggatatcgcggattatctacaggtatgacaatctgtcactgatccaatcagattcctggaagggatctgcaacggggagcgacattggtgttgacatactggcaataggagcgacgtcgagttgaagaagcatacgcccaagggttgcggaagctggcgcatcggccacagttggacaatggagctgctcttgggtaaattgacctttccctggaagattgaaattttttgcatccggtaatgatactgacctgcgaaaactagcattttccaaatcccctggcaacgcatcatcagtgccaccgaaaccctcgccgtatcgcacgagacccttgcgaacaagatcgaggaagatgtcgaacgaccactaagagaatttagcaccaagaatcaggagatgaagtcgttgcccggtatccaaagtagtctggcggggttggcgaagaatgtggagactgcgcagaagaaggtagacaaggccagggcgaggggtgccagaggtgcagacaaactttccagcgagattgccaatgccgaggaagtccaccagcaatgggattcgcgggctccctttgtttacgagcaactccaggcagccgatgagacccggctgaatcaccttcgggatgtgctaacacaattggagactcacgaggtggatcaagtcgagcgtggtcgccaggccgctgaaagctgcttgaacatccttctgaacgtggaaacagcagatgaaattaagacctttgctgcgagaatggcgggcccacgagtccctacgcaggccatccctagaagacagactgaaccggcagagacaactttcccaatcgaaccagtatccgagcggacacagacagcgccaatcgatcgtgaattctccacgccaacaacagaggctccgcttccgtcccttccacgcacccatgatgatgcggaaagccaactatcagaggcatccgagagaaccaccgtcgctccgacacctccaggtaagttctacagtcgggttccctatgaaacattgagattctcatgatttatctagtaccagaagcacagcaacggcatactcctctggggggattgagacgtcttggcactgtcatgaacaggagaaagagcgttgtcttgccttcaactggatctcatgaccgaaaggcagacaagaaacgtagtccctttgctgcattcatgagagccgactcctctcgcgatatgcaaatacctgaatctcctcccgcgaccggtgaccgtccgggaacatcctttaccgatcaatcatccttgcggaatcctagtatgtcgcaagaccgtgccggattagatgctggggcaactatgtctgaacactcggagaccagaaatggagaaaccaataaccatatcaatcaggtaaattaccaaccagcgagttaattaaaggtgccaaccactgactgtgtcttgtttagccacaggttgatgccgaagggttcactcaacgccctgcaacaattgacgagatcactcgtgcccagaatgaggcagcggggtatgttaccttttgccaacggtgatgaacgaatgctgacaatatcactacagcatagatgagtctggtctaaacttgacaattcgagatcagcccatcttcgaggatgagaatcaagcgaagcgagccatggatgatatggcaaataccctccgaatggttagtaacaggtctcgccattgatcaaatattgtgtatgatacttactctgtgtacagcgggctccgcagacaggagcgagacgaaacgcaggcactattcggggacgccgtgacgtgcgcaatacaatgtttattgcttcgcctagcaatgagcctccgccgtcttcggcaggatcggagtcacagccaccaacctcgccaatcaggcatatcacctcccccagcattgcccccagtacggatgatcacgctatgtcagatactacatctgttcgctccggacatggcccgggagcttctatccatcctgatctatatgaatccggcctgaatgcttcaatcattgagaccatcaatgcatggttctcagagggtaatgtcaccaagtcctttgtcgttggtgagcttgctctggcaaacaactccccgcctggtactgtggtagacaatgcgcgcatccgactcgataacttccaagtgctggaaaaggtagcggccaatccccactttgtccaggaggccaaagacacaggcgatgacagcagaggcgaatacgatatccagctaggcaacatctcccgccccatgccgacagtcgcattcaaatatcaactgcatatcgacccaagcaacccctccgcctactgccctgtgatatttaatccagtgtggaacttagaagaaaaacaagccagcgccatcatctactatacgctcaacccatccttcatatcccacacaacggagtcaattacccttaagaacctagtcttgaccatcaatctggacaccgcgaccgaggacaaaactaccaagcagccgcgggagtccgtcgcccacgccatcagcgccgccatgtatcccaataccggcgccaccttccgtcgcaaaacctctaccgtcacatggagaatccccgagctggaagtcaaggctcccaccaccccaggcgcagacagcaagttcctcgtccgcttcatgacgtccacccccggaccccgcaagggtacagtcgaagcaaggttcgagctccgcggcgctgaatctgcttctcagcttggtatcagccgttctgcctcagaaacagaacaaaaggaagccgaccccttcgctgacgatggccgtgattccccgctgtccgcgacttcctggctgagcgtcccgacttcacgcaagctgatcggtggaaagtatgtgtcttcctagatatgtcttgcgcaatgcgggatggaagtacccatgcttggtcgtatatattcccttcttccgtgcaatccttatgtcacttattcgttgtttggatcttgtgtgtcatccctccagacagggccccaaatcagagcatcaaaagcttaggatgccattacttttttcgttttgttttctttctgcctttccctctttgtctcttgtattccgagtattctcttttcaaataccgatcttgttattcgtgaagtttgttgttgtctgttcgatttggatgttgttctgtgtagtcaggcatttgcttcgcgtacatatgactgtttcaaacacatttagatataccagtacgtatgtagtagtcaagagcattaatttaggaaatctttttcgacccgtccaaaaattgtctgccatcgaaactttgaaagctttggagagtgctttgaaggtgtaaaaaaacaatccaagtttataagattgagttattaagccagctttgagttcgttcctaatcagattacaacatacgccctaacctcggtgcgatatgcagcctctgtggcttgcccttttctcatacctgcttctctattctcgaatattctagaacgagatcaagaagagaagaaacatatgtaatccacagaaacgctgtatctagacctttggctatgagactactaagtctaccgcagcaaccacagagctaccggagaagcgctttacgatcacaaccactgctccttgttctcctcgatccaggctttgaagtccttcatcccagggtagagctgacggcatgcagtcacatcacctccatacccttcatgttcaaaccaacgaaacatatcacccacggtaccttttaacaaaaacttgactgtagaagccacagggcaaggagccataggcataggtgatcccacaacagccttgaacgtcacatcagcctccctttgagtaagctcatcgccaaccagtgtcagggcaacattgcggtaatcatcaggtttcatgaagctgtaagccgcgacccgaccaatatcccgggtcgagacgaactgcagcttcttgtcccccatttgctcccacatgcgggcgaagcccttcccatggatatcggtagtgagattctcaaagaacgtcacgggccgtaagattgtgtatgtcatatgttgcggactggccgccgctctttcgatcaagtgattttcgatatggtatttggcagcaaagttcttgactttggtaggattaacaggcgacttctcagggccaccgcggtcacctgacgagtagacaaagtgttgcacgccatgggcgaccgccgcgtcgacgatggccttcccttgctgctcttcagcgtccgagttaacctgcacgctgtatacgccccatacagggccgactttttggaagatggcctcgggctgcgttgtgtcgccgtccacgacggagacgttgaaattcgcgccaagcttcagcgcgcgggggctgacgatgtcccgcgttacggcgacgatgttgagccccgccgtgtcgggggccgagaggaggctttggatgagggcgccgccttgcttgccggtggcgcctaggactaggacggtctttcgcggggcagacattctcagatttgaaatgataaatgatcaagagttatgaactgaagttggagccttcgctgcactccaaggcttattgactagctttggggcctgttattgcgctagaccaataatggaggaacgctagagctagtaggggtatgactgcatttgttgctccgtataagaattagttttaattgtgtatcagaaatatgtctacctagccaatagagatttcccataggcagcaactcaagcacgctgatatctaatagagaaccaaatgagttgggctagtctatatgcaatagctatcggaggaaaagacaaactcaatctgacggacggcgagaatggtatatggattattgtagcgcagtggctcatatgctcggtgaatctatttatgtttacactaggcctgaagtaatgctatatgttattgggatctatataagctttctttctcacattcaattatgttgcgcccacgaattgatagagaggaaggagtggaatatgtaagaattcaagacctgacaaatataaaagcctcaacatagaatcgttcaattgcaatcgttctcaaactcatcgtcaatgccgttcccgatctgctgctcgatgtagcttatatcgctgaattcaatacatccaaaaccatcgtaacggacggtctgattatttgaatcaaagaatcccccacctagactgtccaagtaaatctggaatgctatcctaggtccgcacgtcctaaaagctttggtcaagcgatataaccagcgccctgtcgcgtagggatcgggggtcaatatctccctgcggaaggcatctcgtagtgtcgaaaagctcacttcctcgacaccgtgttccaggggcctcatatcttcgattctccaagcgaggattgctcgaagtgagacaatcctcaatatgtagtcctcaggtatctcccattcaaatagatattcatgtctgaatacgtttgaatccagcccaagctcctctgcgagcctctgagcatgatgtgggccgttttctacatcggcctttggcactttgatacagatgatccatatcttgtcttcattccgggagttgtacttccccagagcacgattcagagcttcaagaggacggtcggtgacagaaactagggctgtaggatggccattccacctatttcgatgagagtcgaattcggagaggagggcgtgttcagacaatttcggacggccaaagtagttgtcatacgctccggatctcagtccaccagcactggtcaaggagaagcagcgataaaaatattgatgtttcatggtgagatggttgtcaaaggtagagactacgaaaagtaagaagaggcagagagggtttcagccttgaggggattaggctgcaatgcataatagtatatatatcaatgtattgggtacaaccccggttctttggtcagtaagaaaaagtacatcctaagagacgctataattacgagcgaagtagattatcacagaggggtaaactatcctttagactcttataggctgcccagaatactgtactttcatgcttatctacttttcgactttgtgttccccgattgggcaaggggtgtataggcttgccctccccaggatcaaaaaagcgcaaatggaaagatatacatagttatgcggtgtcggattaataattgctgcatagaataactatggataaccgatgacaagacatacaacatagcacacattgacatgtgctggggaatcacaaaaatacagatataaaaaagtagaaaaagccttagcgaacatgatactgatcccacatatcacatcctagcagcgcgggtggtcttatcatagaagtccaacgtcatggccgccaggaaacatggaatatcctttctttcttccacccagaatttgatgagaggtttaagttccatggcaaacagactattcggtccgcccgatatcttcatggtgccgttctcgccatcgaaaacgatagaattttcttccccattgcccatgctgccaggaccagagtcagaaggtgcatcgcagtcgccgtgccgataagcggaggaaaggtgaaacatggaagtgactcgcactctaccattcggcaagaaatcaagcttgaagccgagaagagaggcgacggcttcccggaactcagaggacttagctgtccagatctccttcaatcggcgcatacgcttttctttgtcggcaacgatgcgctccatgtcttgcatttcgagcttgatgctctccacggtgctgaccgggacaaatttgacatcggtacggcccccgcgcagctgtgccattagatctctgtttgcagactggagggttgcaagagtagtcatcttgatttgctcggtttgggccgtcggattatcgcgcagttcaagaatgcgtgttcgtgacttggccttcaaagacttaatctgtgatttggccgcatccagttcccggcgagcgagagtcgtggcctggtctgatttggtgagatgttcctggagcttgcggttcttgcggctgagcacagcgatacgctcgctttcggcttcgctgttagtcggagaaagagctcgtttgacgcctctcgcctcttctttcggtgtagcttcctgcttggagagctcttcatgaactttgtgaagctcactgcgatattcatcgacgagttgttgcagctgggttatttgttcggatttttgttcatcaaactgcgactgatcttcgttcattgtagcctcttccgcatcaaatgtcttaagttgtgcgcgcaggtattcaacttctttcactgcaagcgcacgctgacgctccagtcgagctcgaagccggctctccgcggcgaccggtcctcctgcagaagcggcacccgcaacgcggagtttctccaactcccgttgcagattatttttatcattttcgaggctcttgatagcctcgtccttctcaaggaattgggcatcaacagttccgagacggtcaaggagcgtagcgatctcaattcgtccttgaactaccgccctcacgatggcatctggtgagtcaaattctgcaggctgctcgttttcctgcaaaagactgacccaagattgtcgctcatcttctaagatctgcttctggatctgaactgtattgagttcggcttcaatgcccttcatcaattggagctggttctccactgatctcttttgttcttcgacgacttcaacattcttcgaaacttttcgaaggtgacgtagctccgttgtttgatcacggtttgctgactccaattcccgaatatgatggacttgctcggaaagttctctctttaatacagccaaaacctcggcatcgttcccttcggccttcaatcgaatattttccgcttcgagctcggcgacctcggcttcacgctgagacaatttctcctgcgttgattcctgcgatgtcctggcattttgaatatcggtctggaattcctcgatggtcttttgtagagaagcgcggactgtctctaattcgttgatctggtatttgaattgccgttcctggtcggaaagtcgagcctgagtgtcgtcaaactcttcctgcaagttctgattatcatcctgaaggcctctaattttgcgctcaaacgcaagtttgtcattcaaggcctggtcctgaatttctttcaattcctttgcgagttcgtcgctcttatgggtggcccgattactcgaagattcggcagtctgcagcaaatattgtcagtttgacctcgtgaaaatgaaaattttgtagcagctcacctgagcctttcgaaaatccgcatccgctttcagttgcaggtcgcgaatctctttttcatggcgaagagcctccaactctcgttcctgtttgatattctcgagctcgtatttgagtgtgctcaattgcacgcgtagctcatctttttccgcatctagacgggccagtcaggtatccgtcgaaggcatctcgactttatctgagcagggtatcgtctcaccatgaataagttgatgggactgggcttgagattgtgtgaaacggccggattgtcgcatagtagtcgatcggcgcatggtgctccgtgaaccggagggtgttgggggtgagccgaatccagcaacaagctgggaagctggtcggttattctggctatggtccatctatgaaaagccaggagaggtcagttgttgcgcaaaaataatatggagacccattagagctcacggtaaggttcaggctatcgtaagccccacggaaattccgttctaatgcggcatgaggcgagaaggactgcacaacttgtcctggagccgtatcaaagggaagatggttaaaggcggcaccgccttgtttaggattatgtcagcggtgaacttcacctcaaaagggattagcgcctttttaaaaattatttcgatttcggcatcaaattctcagttcaccaccttcacccgtgactcctctcctttcacctcggtctctcgttcgattttactcaatttcttccgcttaataccccacaaccgctacaatgggcaaggacaaggtcgagaagaaggaccgtgctgagaagaaggagaagcgcgcggacaaggacggtgtgcacaaggtcaagaaggagaagaaagagaagaaggataagactactcttgtcgatgcagtagagaaggagattgtctccgagcccatggagggtctcgagcagaccgctgttgtcaagagtgaggtcgacgccgttgtccccattggcgccctcgtgccgttcgcccacccattggttgaggacaagcaggccaagaaggttttgaagagtgtcaagaagggtacgtggattgtctttttaagtttttacttgcctcttttactatctgtgcgcatggtcgattttcatcggatttggatcgcccatattcactgatcgcatgattgcgcgacttttttttcttatctccagattctccatgctaaccttagttcttctagctgccgtcaacaagtctctcaagcgtggtgtcaaggaagtcgtcaaggctctccgcaagtctcccatccccgctgccaatgctgccatcggtgtccctagcggtgtcgtcgttctcgctgccgatatctcccccatggatgttatctcccacattcccgttctgtgcgaggaccacggaattccctacgtctttgtcacctcccgtgctgagcttggtgcttccgctgccaccaagcgccctaccagtgtggtcatggttacccccaaggctgccaagggcaagaaggaggatgatgaggagttcaccaaggtcttcgaggagcttgctggcttggcccagaaggagatcaagaagctgacagtctaaaaatgttctcgacttgtctgctttaccttttgttatttgctcttcccacgctgttcactgcgagtgggttctctggttgtacaggtttctgataccgtctgttcagacggtgcatgtcttatggggtccggcctatgggtatctttctatatttgctgttttgttccatctcggcgttatttcaatggtgtacgaaaaagggcaagaattccaatgagataccaccaacctgatagactttcggtcatgagtaaggtcttgggtaattccaatggacatccatgcaatttccagccattgtatttccccgcaggcagtgtgacacctgcatagaccacgttatgcctgattgttgtaggagttgatctagaacagccggctccccttgcgtgatagataaacaggtcgcacatgaaatgagtctcgaccccttccaattttcgatagtgtcttaaggcagtcagccctacctaggtacatttgcgcgaatgtaatcagtcacacagcgtagcgaagtcaataattgtactagcaaatcgggtcaacacagcgctaaatatttagtgtgaagagccaagcctagacaattagccttgcatcgtaaaatgaactattaacgtggcgttctatgtctacgccgatcaatatgatcaatccctacgcccctcgaccttgacattgaacaagggatgaagtacctaccccaagcgcagcagatatcagtatcagcccaatcaccatgcgtagcgccctggatgactctgatcctctttcaacactagcctaggtctagggacgtatttggtatcaggcaccggatctgagaatcgggtggtgacttttgtcctacgcttcttccttgtgatcaaggctttatctccccctgtccttaaaaaaatgatttaaggaactatacaccctcattatgcgtcgggcaaatcattctttctgcatgtacggctgtatcatttagccaatttcctttttatatccctggaaatgcatatcaatcgcccctccttcctaacactcgccctcattttggctgttactcaatcaactgcatcccaccccatccgaactagcaaatgcgtcaagatggaacaattccaagaccccaatgctcgtggaatatggaaggtctttgagaaacatgaagaaggatatgatctattaccccacccaccgcacgtcaaatacaacggggtaagtaccaatcctactatgtatattgtccactcggcgacttacctatagccactatagaacccagcatggccaaccaacgaaaaaaacgaatcaacagagcaggacacaccaaatgatcgatatacaacaggaacctccgaatcgggaaagccagtctcaatcctgattctggaatccccagaaatacccgatcaaatgatcctacaatacttgcgcacaaaaaacgctctaaacaaggagcacgaacacacctcgcctccatctttctcccactcctcttcgggtccatcccgcttcaccttcacaactttaagattgaacttcccacagtatcctcttccgggggtttctacgacagtgattactctcctggtactggtttggattgttatgttcaccattgggctgcttgaattggcgaattatctttggagacgaagggaacaagctttggtgagagagtgtgttcaaggtctgtatgatgaggaggaagatgtgggcttcaatgagacaacaaagatgcccttgaggatagttattactcctccgcgaagcaatggactgtgctccgtgggagaatacgaatatgagttccttgagtctgtttctagtgactatgagtctgactgtgagtcggactcgggttcggactcgggttcggaatctgatgagtttgattatcgtatcttttgatagatagatacaggaatgacatgactagttggctcgatggtatgtcttttctttccaagtagaaaaaggcttaaattgtgaaaactgctcttttgtctaacctttgatacatctcatcgttattttcgttgatcaattattgctagtcttataatagaatgcatcgaacttgacaattacatggcagaatttatggaattgaaacagagtaagaataattatattttcaggtgttactgtacatgagtatacgcagtcataaatcatagctcatcatagtcccagcctaggccgagcccagtcaaagcgagctctcttgcatgatcccaatacaaatatgaaactcgttgggccaaatctcaaacaatagactcaaatacgctggtcactctgtaggtgctcatatacagtatggccatcagcacccttctgatgagggcgggcggagtcataagcactgtgcgcattactgcgctcaaatcggttgatagcctcacggccagggtcctggctggagccgatctcagaatcgaagctgacattcttagaattgtcggagggcaagccaccacggttaatttcggtcgcgccgacgttgggctgactcctaccaccactgccgccggtggtagaatattcgccagctttgatgcccatttccttcttggttgcagttggaccaccggcatacccgttttctgacattgtgccagggaagttgccttggccgacaacgcattcggggtacttctgttcctcatgacggtcctggcgttgagcggcggtttgggcggagggaagcttgatggaggcggagacgtcggtgttgtttactgtggattggtctcctgagacgcccatgggctcggcaccacggttggcagagaagctgccaccgtggcggacagactcggcggcaagcgaatcattggttacaggaccagatggttcttcgacgggctgttgtgaacgaggatcgtgggtgaccttggtgccacggttggtgggaggaagaggagtgccttgaagatccatgatgatttgattgattgaaaagggagaaggttagattgaagttggtgaagatatgttcagtagagaagagatgggagataattaattgataaactctacatggccgtgatggcagatctatataggaaaccagtgagctatgacccgtccgcatgttggaagtatatggttctcatcgaactacatcgtatattaaagataattgatgtcatacttacgttaactaggagcatttgcaagatataggcaagctcgatttcttggctagcagcagtccatgtcgactaattatatttgagatactctgtttggtggctggagaaaccgatcgaactcgcatgtggagaacatgctcctctctgatgtattcatgcctccaaaggggaaactatgcccccacctcttatccctgtatctcctgagaagcttgacgttgagaggcgattgacgtcaggtctagaccctggtatgcaaacagtgcaaatatctttatctttactgctgtgcaatgtacagtcttggcatttaattttatattttgttcgatgacggcatcgctgtttttcatagcaacagacttttatatgtttattgtacacaggtatagttttggcttaacattgacactacatgaaaccataggctttctagatctgcactattatagcctccgagtagaaaaaaaaaagaaagacggttggttttttctttcaatagtctatttgatatagtacaaatcatcagcttgaaaaatttgcgattaaacttcgtcgctcataacttgagagaaaaattgactacacataataaaccctcgtgatcacatattaacgggtcatacctagcatcagtcaaggtgtgatgtagtcctcgtcctcgagcccaagttcgttagcactactgccggcaggagcacttccacgcaggccactgttatcaggagggaactctaaacgtccagagccaacgccggtaatacgttggtcgagggaattccagtcactggcaactgggggttgatcaggcagaggcagattggccttaaccctgtcaatttgtgcggacttgtcggtgttttggtcgataatagactatagagcatatgttaggctatctgatttctgcttggcgttgggtgcagatagctcaccttcattctagagacatttgagtccgctggagggttgccaccgtgcaactgggaaagcttggactcggccctgcgaaggtcctggatggtggtatggaaggtagcgttagacattttgcgtccggctgtaaatttgatgatttaaacgaagaagtgtcagaagtggctgggtatgattttgaatctgaagcctcaaggcaaataaggacttatatatctactattttctctgtcgatggcaagacgctgtgacgtctgctacaatgacgccatggcatccaatgccatgggtattctcaccacagaaccatctttgacatgcttcatgttggttgggaattctaggctgttgggccaacagcagagtaattaactgggtgagtcttggggactggcatcatagatgatggaccacctgaggtggcgagcctgctgatgtgcttcaacgacaagatgctaccaagatgctacgcatatgatcccactcgaggcctgtcgaggagccaacggatatcttgaagctagacggccgagatgttctggacagattgtatgcaatacccttcagtccattgattgtcgatgttctcacacgtttcttggtatattacgaccgcgatcgggagccttcgatgaataatcgtggagggcatcatcttaaactcgatcagagcctagtacatcacctatctcatgtttgacaacacagcaggagcccatcctaatcaagcttgcacagacctggaattcaaggacgggtatagatatacagcggctagccataaatttccatcatgaattatagccaacagaccagatatcggtttctatcctcgagttattccataatgatttcaaggcgcgatagtagacgcggtatccactgaaggcttgaagagtagcggcgtcctaaagcggcataaaagcatgcaggtcatggctagcaccgccttcctttttagagcggcagaaaatgtttcttatcgaaagacagccaaccccgagatgcgtggagacttggtgaatcaggtcattgtgttattccaaggatcgtttgcccttcgacgcatctatacttcaatatgggtcgagatccgctgatcggactggtgggaaaggtatgttgttcccctccattgttctcacaccccactgacgaggggcatagccgtctagtggaaaatctacaacattgaacagcttgaccgatgcgacttcgaaagtcggtaagtgaaccgagatgcgattatgaccaactgaaacctaataaattatgttcggaacaggaaacttcccgtatgtgctccccgattgttctacatgagcatctccaccttatcgcattgatcgcgcagaccgtgttgacaaccaacagcttcacaaccattgacccccagcgagccatcggataccttcaaatcgactgcccatgccagcgatacaatgtttcagatcgctgccagcccaattacggagcctgccacgaagggcgacgttccgtgccgattgagttgctggatgttgcaggtcttgtcccaggcgcgcatcaaggacgcggactaggtaacaagttcttggacgatctgcgtcatgccgatgctctaattcacgtcgtggatgtgagcgggaccacggatgctgaaggttagttgggtgtgccggattgaatacaatggcgggatcgggtgttgataaatatcgcaggaaaggctactcgaggttacgatccctcagtagacattgagtggttgcgatcagagatagttcgatgggttctaggaaacttgatggagaggtggtacgtttgcaagtgccaacaagggaacgagggacaagtgctgatctctccttaggggttcaataaagaggagacatcaggcattgagtcagtggacttttccaatgctatttgttacaccgaactgactcttagcacagaggcaaaccctgtcgacacattacagaaacagtttgctggttatggaagtacccacgccactgttgcgcgatttatggataaactcgccttaaaagaaccattggaagactggtcaaatgagacggtggagcttgttgtgaacgcttttatcgacgagaaattccccactgtgttcgcgttgaacaagatcgaccacccagatgcagacaaggtacgaatatttagcttatggcccatatattgttctgacaggaattgcagaacatcagcaaaattgcgaaaatgcaatctcccgaaagcattgtgctttgctccgctatatccgaggtgttcctccgaaagctggcaaagcaggattacatcaagtacgttgaaggcagtgagttcatcgacacgcgagaagatttgatcgagatgggcgacccagacggaggaggcctcaaagagatggacgagaaattgaaaacgtatgttcagtgctcatataaatgtcgtacttttgctgactgacgtcgctctagtcgggttgagaacatgaaagatatggtgctgtatcgatttggatctaccggggtcgtccaatgtctttcccgagccgcagagcttctaggactcgtaccagtgttccccgttcgaaacgtggcgacattcaattctggcactggaactgctgtattccgcgactgtgttttggtcaataagtgagtactctctattagaaggctgacgccagtctaacatttcacagaaacagtaccgtcggtgatgttgcccggaaggtgatgggcgacgtacctatcaactatgtcgagggtgtgggtggaactcgagtctccgaggatgacattgtggcagttgggaaacacgacgtgagtgcccccactaactacataatacggttgattgactgattaccatggcagatattatcgttcaaggttggtcggtagaccagttcctttatgtacagcatctcccataatatgacattagtaatggaaatgtcttatggactcgttctctgctagaatcacaaatttggggcgtcgacttcaccgtcgagctcgaagaacgcatagcccatcacaagatactttacttcaacccccctgattaattcacagtcagcaacataaatcccctatcattcatatggactgaccttttgccgctcatcgttcatgccaatgattggctctggcgcattgggatgctcctccttagccttcttcccatgcttggtcccgcccctctcggtcattccctgtgacttgctgtcatctgcaattccctggtatgctctcctctcctccaatccagaggccactgcctctgaatgtacatcgtctgtatcacctttctgagacctcttgcgtatgtggtcctccgccgaactccctttccaatcctcgaagatggagtagtatcggaccccaagtggtgcacggagaaccggcgggcgtatgacggactgtaacggtaggatgacccgccaaggttggcgtgaaacagacatgttgtgcagcattgatgtagcagaaaagatacagtggttgcgcatagtgaattgcgagtaaatctaaatactggactcgccacaacgttggcttttatgattattcctactgcgtgctatgacgtccctatgctgcaatgcttttctgtccaaaaagggtaagggagccggttcgagcgggcttatcgataaggaatcgatcgtcatcgacgcgacattttaactaagcggacgacaccaaccgccaactcactatgaaacgcgagtatatcccgatcgaatccctgccagcctggcagcggctcagtggggtcgtcgtccaaggcatagaagtccacaagattggatctgatgaacatggcgcagacaaaggcagtgcgctcatcgcaacagaagcccagacaagcagcgagaacgacgcaaaccccaagatcctgctacaaatccccccggaattagttctctccctggaaacagtccataaccatgccaaaaccgacaggtatttgcgtgatgtgttggaggcaatcggcgactttggaagggtatgacccgggctgctcccttgtatctaaagggcaaaaccaactaagatacacagacagccagaggagcaatcctcatatttttgctcattcaactgtcccataccagcccagatctgcgctcaggacacgagaccatcggtgtctccaatccctggactgaatacgtgaagttcttgcctccgtcgttcccgctgcctaccttctacaccagcgaggaaaaggagctcctccgcggcacgtcgctagccgaagctctcgatgcaaagcttacttccctggagcgggagtttgaacagcttcgcgaggctacggagggtattgcgtggtgccagcggagctggtgggatgaggagaccggcgcgctgaacattgatgattggaaatatgtcgatgctgcttatcggtcgcgcatgctggagctacccggtagtggcctggcgatggtgccttgtgttgatatggccaatcatgtctccggtgatggggtcaaggcgctatacgatgtagactcggaggggaatgccgttctccagttgcgatggggcaagagccttcagcctggagaagaggttacgatttcgtgagactattctacgatggacgaggttgtggacttggctgatatagcatgacaggtacggggatgaaaagcccgcgtctgagatgatattttcctacgggtttttggaaagcggcacgacggaagcacgggggattgttctcagtttggatatcccagcggatgaccctctgagcctcgcaaagaagatgttctgccgggagaatccgggcctacgaatatcggccgttgagggctctgaagaggtgacctgggagagtgggcttgcgtggatggcatgcgtgaacgaggaagacgggcttcactttgggatcgcacagacaactgacggcggccaggagttagaaacgacctggaaaggcgagaagatcgaatcagcgagccgtctccgcgagctacttactgttgatcctctgtgggatattttccagcttcgtgctgtggtgctgctgctcgaacggctcgagacccagctcgctctgcttcaggagatggaggagatcatcacgaatttacgagaggacgaggcagatttggatttattgttccgacctggaatctttgcctcgattgcccagttccggaccttggaaggggagctgctggagagggctgttgagggcttaataaaacaggtcagcctacctgggtgtcttacagggcccccttcttatttcttgccactgaccacaacacgcagagaactgagctactggcttctcaaacggtggccgattatttcaaagcacaaacaggggagccggacgaacccgaagacttttcatgaatgcgagagcccagattgtgttgatgggtctaaaggccagactgcagagtacagactagacaagcaattaatatcgccacggacatgttcaggcatccgaagcattcctaaacatccacctcctgcccaatctcgttggctagcagcctgcagccagcccagtccccgccagatcatctcaaaaaaggttgggagccccaccgccccctagcgcatcgaactattccatgtgtagagactagcgtccaatgatgacgaaaggacagggaaaagagaggtatgacgttcctagtggaagatcattgagtggaaaaaggggtgaggaataccacgatcgtagggatctacgtactaccggcagtctattaccgtcagtgcgccagttcagattctgcctgcagcccaggttgtaccaatctcgcctcgaatattgtcgaggcgaattttcatgcttaaatgatcaatgcttaaattctgttagtgttacgtgttgtctatatttatctctatactccatagttacttagtatagtattatgatcatcatcataatgcatgtgacttctcgtttcatttatagtttagttatgatgtggaaattacatcttccaacagctaatagaaatacaagtacaaatagaaacaaaatagaacaggcaatggaaaagtaggcgaggtcaaattcaaattcaaatttcaggtattacagggtcaggtgcatgcggggaagccaagccagttacagacacgtccgagaatcaccgggctggcctggcgttttcgtaaacgaactttggccgcgacgatgacgtgaactcggtatgccagcagcgcgcatagtttcgagcctacaattggaaatgagggaattggctatggagtccgaagtatgtgcatcgtagctgtccatcgcgaaatctccacccgaacggagcccggtggggccgtgacttataaagtatggttcgctgatttctcggacaaaactcgctggacggaacagaacggcactgtggtaagcttaccgaatgaatacgaggcgtattattaattcttaaattgcccattacgagtgctctagtattgtcgaactatatcccgcgtccttggttgggcgcggatgacaacgactgaatcgcttcagttgataggtgcccaggtggagctagtagcgctagtcatataattcacacaaatcctttgaaactctagttgcatcggattgtttttttttccccgcggttgatcccttgaacgagttcgccactgcagtgaagtctatagattacttcattatctaatttaaaccttgggggctatcccggggatttctcgattctcgtaaattagcgtgggattgggtttgggcgtgggcgagatgacttcaggagacagcgagtggccaacgaataagatggtactttgtgcgcagtatccagggtgttcagtatgcgaaccttggaaggatcgcggagttatctcgtgcgtttttttgagtggaaagtgagacatattaaccgtggatggtggccgatcatcggaccaggatttaataggaagcctagccacacctgcgttaatcgacacgagctgcacaacccgggggaggaagtcggaagcgggttgggaattgcccgcaaccgggtaggattcgagtctgcactctaatatgtagcactcgaaaagtctatctcggtactcgatacagacatgtaacccttcgtttttccatattcccatccgcagataactgctgtccaaagagtagaatgtggagtgcggggaccgggaggatcggatccaaccgttcagacataagaaatgtcgactgcaggaagaatccggggcgagttttgagcggtttacggggtaacaggtatggagcaataccgattattagtttaccatacaccgtccagtttattggaaggctccgaggtcagcaggctccactttccactgactcagcgaccccatcttcccgaaggtcgcccccccccatgtttttaggcttctttctgcatacacccatactggtccaattcaaaccggtgattctttagttgcattgtcctggtgtcaataatccttatacacagtgcctgcgtacactcctggcgcctttcaaatacaaccaactcaacccccggtggcccgtgtgccccttctgcacaacatgcctggtatcttgccgatgaaagtgatcaaggtcggtggcactggcaccacgagccgtattgctcaggcctgtgaccgatgccgcagtaaaaaaatacgctgcgacggcgttcgcccttgctgctcacaatgcgccaacgtgggcttcgagtgccgcaccagcgataaactgagccgccgcgccttcccacggggatataccgagtcgctagaagaacgagtccggagcttggaaacggaggtcaaggacttgaaggatctgttggatgagaaggatgagaagatcgatgtcttgtcccggatacattcgtttacgccaccacaacgagccccttctgcaaggtctccttcagcgtgtgctacagtaaagtcgaatacttcggagtcgtcggatggcatgttccatgtagagcgatcgacgactcgaccatccccacaatcgcagaaccctttcgttggattttctagcacacagggctttgctggtatgttatgcgtttccctttgcaggagacaatcaacttacatgtgcagatgtgtttaccaacaagcttgtccttgaggggaaatcagctactaaggtgccgacaagagccctcactgccttgtctgccttggtattccagggtacccccaaccaggctgtgaagacaccacctcgcttggtgtcggaccagttgattaacatcttcttccaagaatgggcgccgctgtacccggtggtacatcgaccgaccattctaaaagcttatgagcagtatctcaacaacacagagaccctgcagcgtaatccccatgtgatggcccaattgaacctgatttttggtattgctgctctttcatcaatgtcgcgaaccaatcaagacccggctttctttgaagagaattggtcggccacccttgattcgttctcgagtgaaacctccatttccagtctgcagtgcttcgctcttggtcagatttattgcatgaccaaaggcgactaccgcaccctgcttcgctaccgtgccctgggtgtggatatctgccatcagctaggaatgcacgaaaaccaagaaagctcgggaaacccactcgaggacgagacttataagaaggttttctggtcacaatatgtgcttgaccgattctgctccgcgcttactggactgcctgtccttttgcgcgaagaggatatcgagactgagtatccggttgatgtggacgatgagaatgttacagaaacaggctttttgccgaccctgcctggcgaatccactcgcatctccagtgccatcgctctcttcggagctgcacggatcttgaacaaggcccttgcagatctgtacccttcaaaatctggttacgatgtgtgtgtctccaaaatgcgctcggtaacagggcaattggacgagtggcttcacacactgccgccacaccttcgtctcgagttcagtcaggacaagcctagcacgaacgtcacgagtagtcgctcgccgctcctggtaagtccccgcatggattcattaatgttggcagaatactgacctgttatagtcacttgtatactatttcattcgatctttgattcatcgcccagctgtctgctacgctgacgagactcttcgctctcagtctgttctagcggtgtccgattcagcaaagcacatcattcagattcttgaacttcttgatgagaggcgtttatgtctgtccgtttgtatcaacaggaaagagctcatattcctttccggccttggactcctctggcaaatccttgatatcaagaacgatagcaaactggccaaggatagccagaagctgcttggcactgccatgcaatatctccaatcagagtcgagcgcggcggctgttgaattcaacatgctgtccaacactctgattcctctggacggcggaagacgcccttcagtgagcaatcaacaccaggagatggtggcgccaacacaaaagccccgaaaatcccccaagaagcacttgcaggccctcaagtctcgccttatcgcctgctccacccgcgataagcagcctcccacccaacaaccctctcctcagtcctcccgccgtaacaccatctccggaaccacccccccacttcttccccagtcgctccgctcccctagctggagcagcctgcccctctctcaacctgaccatctctccggcccactctaccacaatgacaaggcgaattctcccttggatctagcctcagaccctcgcttatccgcatccttggggtacgaccactcacgcaacatgtcctgctctacaccctccgacccccaagctggtgtcatcacaatggccgattgggaatatgtgctgagtgacatggaccgcggatactccaacatcttcacaggcatttatggcggcaaagaatgcggcgaagacccgggtccgttcgcctcaattgcagcagaatacaaccgcaaacccaacgatccctccctagtcaaccacgcgcagggtgagatgcacgacctctcgcccgaggcgtggtccgccagtagtggcgacttcgtacataaacaagaacataccgcgcagagcgtcctgagctattcaagcgagagcatgggaagcgccgaggaatctctggcgccttatgccgatgtccgggtctgtcctgaagatatgaatacgatggacccgttccatacttttgctctgcatggagaatgagctcgatgagtttctttagtcgatgggtgggaccgactcttgtccgtctgattagttatatagcgctgggtgtctttttggaaggatttgggtttgacgcttttctgttctattcatgatacctgtggatgggggcgttatttgcgtttttttgtttcgatttctgtctggtattttcctccatctgcctttggtcttctctgtttggaaacatttttttgtctgtcgtagtagtacagtatgcttggggataggcgacgtctaagatgtcgtacacatgaatttgatgatgatcaaacactcgtttggacctaatcgcacctgaagtagatccatatgatccatataatattcctacaagcataaacaacacagcgcttcggctcttggtagcaatactttgcccctcgggtcttcctttccctagaggatattgttgtggaacatcgcatggattgtttgaaagagcagctatcctcgtgtagcagctggtcgatgagaatggtccttcataaccaattgcagtttgatccgaggtgttatgccgctgagtcagcgggaaattgagagactccctgagcggcatgattggtaggcctcatagtataatgtatcccagagatatcgttatacttatacttcgaatggtgcaaccacttggagtgaccaaggtcgcgtaaatatccatgggtacacagccagtaagaagcacagggatcggcttccgacaatccctataaatgcctcttcaggggaacatcaatcaccattgatactttatcatctcgaaccgaacctaggttctacatctcctaatctgacgtccacatcaaactcatatcccaaaatgggcgcgtggaaggagatccggcctcggtttttgccagctgtgattaccatgttcctcctccttcaggtccttttcttagtgaacatgtgctatctttatgcaacgcagttccgcagtaccacccgttatcacaacttcaatgtgctctatgttgactatgacggcggtattatcggaaagtcagtgtcagacgcctacaaccaactccaaggcgacgggttcccaaccctgctgccaagatcttctaacgaatatccccagccagaggatattcgcgaagccgtatgccgcggtaagtactgggcggctatttacactacctcggatggatcagctagtctggaatcagcgctggcaaacgggtcaaacccgccgacctcactcacctacatctggaacggggttcgatacccagtgttctcgcaggcggcagtctacaccaacatcctgaaactaattgcaaccacccggtcaacatactatgccaacgctggatcttcaatagtcacatccgccgacttctctaacgaagccaccctcaaagccttcctcgaccccatccacgctgcagaaatcaacatcaaaggcacgcagcaaggcacaagaatcttctacaacacagtctccatggtgattccaatcgtccaacagttcttcttcatcttagcgctgaacgggatctcaacccatctcgatgcattcataaacctatcctggaaaacaaacgccctgatccgcgcgatagcctctaccatctacgccctcacaggctcactgttaatggccgggtatatctgggcgttccgggagtcgtggggacagcaaggaagtcggttcgtgctgacctgggtcataatgtggctcttaatgcacatcaacttcctattcttcgatatcgcgactgcgtttatcccgattcagttcatgccgtttgttgttctgacgtgggctattctcaatgtcgctagcactatcagcccatttgagctgagtcctggattctttcgatggggatatgcgcttccgtcttatgaggcgtaccaggttctgctccagatttggtcggatgggtgcgataatcggctatatcgggcgcttccgattatgttctcttggtggattgttggtgttcctgttgcggtttatgcgatgcggtaccggtgtaggactgctgtggcggcacgggaagtcttggatcgggcgggactggaatgtcagtcggaaggtaaacatgcagtcacgaatgagacggtgctgccgatcagtagctcgggccgcgaatttgagcaccgtgcggactcgattgagcctgttgttcctcttcttcatatcgcttaaatagggagctatcctaatgaaagtggctattgatggtcatcagaatttggaaaacttgaaattgacagaaaagaggaagggtggaagatgacttggttagcgacggtttgaccacctttggaggccacgacccatatttcgaagtacactaattgaccgagattctcccgtaaactctacttacggtgggtaccgtggcatggaacagttggaaacttttgccttccttttgcatagtagattctctgagtcggaggacgattgaatagactatctagcagaagattatgtggtctatgctacccaataagacgtctagtagtaaggactataatttgatcaaataatccggttacgtacttgaacatttgggtttcaaggtccaatagaataatgtaagccctatgtcctagttatatagtaatgtgaataaaagcaaaaatggacatggactatactcagctctcacaaaagtacagctaggaagactatcacacgtttttctgcactcactagtctatttatttatcgagatcactcctggtttgattcaaaccagtcattattgcgaggttgccatgtctggcaatgccaagctttgtggctgccaccgattacatcactacttctccagacctcgggaccccagactaccgcgtggctgtttccccggaatcttcttccttcccacaaaaaacaagaatcgcgggggcccaaacgcggagattttgccaccgaaagtcggggacgtggagtctagggttgacatgccgaccaacagcaacgacgaaccacccgcacaccccgtagccgacccgggagaccttccaaatccggatgatattccccggactatgtctttcttgcggagataagcgacaccgcgaagggcgcgtgctccgggtttcgggtcaacgtgtcatcggtgcgaggcgtccttcccgactcggtaaccatgagtcctcagaacccggcttccgtcactgtgcatgttgcctagccttggctttcttggtcaggcacggttccctataagaaggccaatccggtccggctttgatttcgaaaattcgaaaatcagttgcgaatagcagatactacgggttaagagtactcgctggcgctatgttcgataaaatcctcaaaaagcgtccgcaggacctctatgcagactcccacgtccctgcaaatgaacaggagaatggtcccggtgatgtcgtcgacacgcctattccgctcctcacgtggcggtcgttcattatgggcattctcgtctctatgggcggtttccttttcggttacgacactggtcagatctctggcttcctggagatgaaggacttccttgagcgctatggtgaaattcaatcggatgggacttatcatttcactaatgtccgctcgggtctcattgttgccttggtaagtagttggctctttatcatttattgctcatatgctaacacatccaacctacagctgtcggttggtaccctgattggagctttagtcgcagcaccgatcgccgaccgcttcgggcgaaagtggtgtattagttggtggtctctgatggtgtgtgtcggagtcacgatccagatatcctcgccttctggcaaatggtaccaggttgccatgggccgttgggtcgccggactcggagttggggcagtttctctactcgtacctatgtaccaagccgagtcaggaccgaggcacattcgaggatcattgattaggtatgtcggaagccagccctatggtcattctgtatcgctttctaactcttctcagtacataccagctattcattacacttggaatcttcgttgccaactgtgtcaatttcggaactgaagctcaacccggccccagttcatggcgtatccctatgggtatcacatatatttgggctgcaattcttggtgttggtatggtgttcttccctgaaagtccacgttacgactaccgccatggcaaggtggagaaagctatgaacaccctttccaaagtctatggtatcccttgcaaccaccgcgctctacatatcgagtttgatgagatcagacaaaaacacgaggaagaaaagctcaacgggaaggtaacctggattcagacgttcagtgctccgacgatggcgtaccggatcgctgttggtgtcgctctgcaagctctccagcaactgacgggtgctaattacttcttctattatgtgagttgaatctggtataatacagaggaaatgcaaccaactaacacctactagggaacaacaatcttcaagggcgctgggatccagaacagttatgtcacgcagctgattctaggcgccgtcaactttggatcaacgttcctcggcctctacctaatcgaaaactggggccgacgccgttctcttataaccggtgcgctatggatgttcgtctgcttcatggtcttcgcctcggtgggccatttctctctggaccaagagttcccagagagaacaaaaaccgccggcgtagttatggtagtctttgcctgtcttttcattcttggctttgccagtacctggggtcccatggtatggacgatcgtcgccgagctgtttccttcgcaataccgcgcgcaaggcatgtctctggcgactgcatccaactggctctggaacttcctccttgccttcttcacaccctttattaccggcgctattgacttccgcttcgggtatgtcttcgctggatgtctctttttcgcagcggctctggtttactttgccgttatggagggacaaggccgtactctggaggagatcgatactatgtaccggatgaaagtgaagccgtggaagagctcgaagttccggttccctgctaatccagaccttatccgggcctcattggacaaaaatgagaatgctcctatatcatctcatattgatcttcctactgagattcgagaagatgggtcggcgccggagaggcaagcgcaagcatgagcgcggttgtgcatgtaccaatagtcttgcttgtttttctttcataacatcattttttatttaattggtcggcatatagcttgcaccaatttatattttcaaatatgtcgcattcctaatgtcccgtaggatattctctagagaactggatcaacctcgtctgtagacttcttcacaagaatcccatccaagtaccgggtcagttcgtccacatcgctaagttcacccacccatccgatatattgatccgggcgaacgaccaccagcgccccaagaacccggtcaactccccacttctcatatgctgttccatcgcaatatcgatcaaacatgcatgcatcatcacaccaaatcttgtcatatgcccacccttccactggatcaaatggacgcagaatctctgggaaatcaaagagttctacctctttccacggcgaagcatggatggtaaagacatcaacaggactcttgaatcgaccaggaatctccatgtagcggttgaaaggcaaactgcttgatccagactgtccagccaaaccctgagtcaaagtctcaatgcgttgcttctgcgttgggtttcgaatatctccagccaaaactagaatgcgaaagcgcccatcactttccaacgctcttgttgtccatattgtaccaccaccagcctgattgcgaagctttgccggccggaccctctccccaggaatcatatgccgcgcaaaaggaaatgtagcattatcttcactcttccaaacaagactgctcgcagggtaaaacaccttccatccatcggcaaagtcctcaaacttccccgcaataagagccatatccgacgccttcgtatccgctccaggtttctgatcagtaaatataggcgaccaatggcgatcgaagtcaagcaacatttccgcaagcggatgtctctccaaagcatatgtcccaagaaccttcggcttgagagtacccgccacagcaagagcaaccttccacccaacattaaacccatcctgcatactcatattcatcccaagccccatcttgggtgagtgcgtgtgcaccgcatcaccggcaaggaagatccggttgtcttttgtggattgggtggcgatccgctgtccgacttggtagacagtccaccaactgcattccttgaagttgaaggtgaagggggcgaagatggcttgcacacgttctcggatgagatccgatgtgattttcgagcggtcaaagcggtcggttgcgcccgcttcgcaggtttgcacggggacgtagaagcggactaggccgcgctcgcgtgggatcacgaggatcgtgcctgcggcgttggttacgacgcttagacggcggacgtccgctgtggaaatgttagtgggaagggggtgcacactgcgggtattacttacggaagtcgctgacgggttttacgtctatcacgcccctgtatatgcgttatattagctgctgtagcatgggtgggtaatgtctaccactaaccatatatggtccgtgttcgacccttccacggggatgtttagctgttttctggtccagctatgggctccatcacatccgattagatactttgctctgattgtctcgacctgtgtcttctgtggctttttacgcggggctagatcggcccagtcatcaggaagcaggttactgcggttcacctcgatgccagccacttcggtttcctgtccgcacgacgaattcgaatcatcttcgccaagaactcggaccttgacagtgataggatatgcgtcgggatcattgctcagtttctcgtcgtattccaaagagtcggcgatcacgctccgttccacatcaagatcagagtgctcccgaatactatcgagaaggaaccgctcaatgcgtccctggttcaagcatgtattgtggaagggagactcatcgaccctaaatatgtcaatctgagcttgtcggacaagctttccctccggtccgggaacctatttgttggtatcgtcaggcaagcctctaatattggaaaacaaggtgatacacacccaaatgttcgcctcggtggagatagatccctcttgcataacacgatgctggaaacccatactgtcaaacaactccagcgtgcgcgaacgaagcccgtctgcgtggccttgaaagactttcgtggcacgattgtcgataatgcgtgcgttgactccgtagcgagccatccagtaagccgccataaggccggatggcccagcaccgatgatgagtctgcgataaatattagactatgttaaataaaggttgggggaacttacacatcggtttgggactgagtagactcttgttctttgtccatcgcgacaggatatatatttctgagcagatgctaaatgatgacccgtagatagagacaagaacgattgtccattcaattcaactatcctttatataaaggaatgtgggcttgctgcgctacatgatcctaaacgagagggccagccccatgtaaagctgactcaagtcacagacaatcctaggattacagaacccaaaatcgatcctaattcaagggtcttccgtgttaatttattcaatagttctcttgtaggctccatatacgacgagatttataccgagcccggatcaatatgccatccatattagtcaggtgccctggtttcctgttgtgacgtggagttccagcagctgagatgagttggcggatttttaatgtgcccatgtagcgcgagctgacctaactgcgatgttgctcaacatgggcttggatgattggctttgagccgggggatttccccgaacgttcccctcacacctcgtcggagttgaggttccgggggtggcgattgcatcgggaggccgtaaactccttgaatgcttattcatggtattgatcaaggaggcaacatgaatgattcgacgcaagcattaccttcagaatttgatattggactggagtttctcatcttttaatcctgggtgacagtgacttcctggggaagcacaacaagggtctgggttgggtgtgtactcagatgggaggttggctgaagacaggctgataccaggcaggcgagcccgacgtacatgctaaacagatatctcgtattttgacagaaaccacaatgcctaggatgtgatcacgtagatgtacagttcagatatacttcgcacgtgactggatgatgtctcccgcgctaactcttcttccggcacaccgagacgttcacgggtgaattcccccgtctcagcgacgacatactgtgggggtcgcgttataaattcccatggattgccattccacttatattcgcagatttatcttgtcattggtgtcacaatgtttcttcggactggcctaattaggaaatccgatgcacggccacgttgacaagtgtcaaggagctgtcaaggagccttcgaggcaggccatcaaagctttttttttcagtcgaccagctgatcatcggcacggttattgaggagtcatagatagaaattcggctaatttccctccgtgaacaggccggttgcgagtcggagcagggtcctccggacggctcccggtgtatactagaaggaggtgtggatggaggagtgtcggaaatgcgggccattgaggtgcagacggaataaacggctattgatgcgtttcgagacaagtgcagaagtggtcgagtgcatgttcatatacaatgtcgttgcttcatacatattcatgccctcgttgatgactcatcccatagggtcgagaggtatagcagctaagcagatacctatacaagtctagagagggcaattggattgatttagcatttcgaacgagacagaaatacccccgtaaatagatttcctccataaattctctgctgaatgcgatctgaactccgtaagctaagttgctgggctgcaggcctccgcctcccccacccgacatcatacccccaccaacaaatacgttcccctccctcttctcttcttctctcattcatctccccaaatcctcccctttactcaaaaatgtacgtactgaactgacttcttgtggttttcctttctaacggtattagaatccgccatcatgggttacactgatctggaccatttggctgtcaacaccatccgtcttctggcggtacgttaatttttcccgggaaaatcgccacgacgttctacgcgctcaatggagctacattggggtcttggacctcatatgaagcttcgatgcgtgcagtctgggaaatctgactaacatttatctcgctattaggttgatgccgttgctaaggccaactccggtcaccccggtgctcctatgggcatggcccccgtggcccacgttctctggaacatgatgaactttaaccccaagaaccccgaatggcctaaccgtgatcgtttcgttctctcgtatgtgctttcctccgtctctgaaagctaggcgggttctttccatgcgaaaaatcaatggccgcgcttttgaataccggctaatctcaaattggataggaacggccacggctgtatgctgcagtatgctctgctccacctgttcggatacaagatctctttggatgacctgaagaacttccgtgtaagtccctccaagccatatacaacagccctgtactcatttcagtagcaactcgacagcatcacccccggtcaccccgaggctcacgacacccccggtattgaggtcaccactggtcctcttggccagggtttcgctaacgctgttggtctcgccatggctcaggctcactccggtggtgtcttcaacaagcccggcttcgagcttttcaacaactacacctacatgttcttcggtgatggttgcgctatggagggtattgccagcgaggctgcctctatggctggtcaccttaagcttggcaacttgattgccatctacgatgacaaccacatctccattggtaagattgactcgagtaccgcaagctagatatgaagggctgacagcttatctctatagatggtgacaccaagtgtgccttcactgaggatgttatgaagcgcttcgaggcctacggctggcacaccgagtgggtcaaggatggtgatcacgacctcgagggtatcgaggctgccatccgcagatgccagcaggttactgacaagccctccgtcatcaagctgaccaccaccattggcttcggctctaagcttgccggtaccggcggtgtccacggcaaccctctcaaggctgaggatgctaagcacgtcaaggcacttttcggattcaaccccgaggagagcttcgttgttccccagcaggtttacgaccagtaccacaagcacgccgcagagggtgctgccaaggagcaggagtggaaccagctcttccagaagtaccaggccgagcacaagaccgagggtgcggacctcgctcgccgtctctccggcaagctgcccgagggctgggagaagaagctccccgtctacaagcctactgatgccgccatcgcttcccgtaagctgtccgaggcctgcctcgaggctatccacgacgtcctccccgagctggtctctggttccgccgatctgactggctccaacaacacccgctggaagaacgccgttgacttccagccccctgaccttggcatcggcgagtgggccggtcgctacgttcgctacggtgtgcgtgagcacgccatggctgccgtcatgaacggtctggctgcctacggtaccatcatccccgccggtggtactttcctgaacttcgtctcatacgctgccggtgccctccgcctctcggctctgtcccgcgtccgtgtcattcacgtcgctacccacgactccatcggtctgggtgaggacggccctactcaccagcctattgagactctggctcacttccgcgccatgcccaactgcatggtctggcgtcccgctgacggcaacgagaccagcgctgcctactactccgccatcacctccaagcacactcctactgtcatggctctgacccgccagaacctgccccagcttgagctctcctctctcgagaacgccctgaagggtggttacgtcgctgtcgacacccccaatgctgccgtcactatcgtgtccactggttccgaggtcagcatcgccattgaggctgccacatacctccaggagaagcacggtgttgctgcccgtgttgtgtccattccttgcttcgaggtcttcgattcccagactaaggagtaccgtctccaggttctgcccgatggcatccccgtgctgtcggtcgaggcctgctgcaccatgggttgggagcgctactcacacgagcagttcggtctgaaccgcttcggtgcttccggtccctacaaggaggtttacgctgtaagttatatccgctcatttgtccatgatcatttactaattatttgcagaaattcgagttcacccccgagggcatcagcaagcgcgctcttgccaccatcgacttctacaagggcgtccccgtgcgctcgcctattaaccgtgctttccagcagatcctgtaagggacggaacgaatatgacgtaacaaaatgttttggtttttttaatagggcaactgccatctagatatacgagaatgcgaataaagcactctattgttcacttatcaatctagtaaccttaacagagtaatcagatgcgtatatttatatctagcagactaaatcacaactcttcccagttcttcttttgcagctccagaacatccctcagcatctcttctttcttcgtcctcttcgcaagagtataagtcccataagcatcttcagtctgcttaacaaccaactccttccacggctgctcgccctcaatatcaatctggcccaggtcaccccacacatcctgaatcgtcggcgcaagcttctggaaaaacgccccaattccaccctctccaccaccagcatgataactctcaaacacaccacttccagcccaccgtgggcccaaactagccttaacaagaatatccaaatcctccgccgagacaaccccctccccaacaagataacacgcctccctcagcaacgcaaaagcaagtctattcccgacaaacccaggcatctccttgttcagcgtgacaggtcggtaatgctgcttagccgatggatctgcactcgagccagcagcaccaacagcagccccaggcccaggaacctcgctgaaatacttcttcacaaactccacctcctcagccttcgtctcaggcccaggcacgacttcaataagcggcatcagatgcggcgggttgaacgggtgcgcgatgaccaaccgctcagcaacaccctcgcacccggctgcctgcgccgacgcggggatcccagatgaactgctccacaggtgtgcatgcgggctagagagactggcgacttccttccagagcgcctgtttcgaagctgtcttttccgggctctgttcctgcacgattgtcgcgttttcgagcgcgacactcaggctggtggctagtttcaggcgcgatgtgcggatcagttcgtcgattatggtggttgattccgggcagtccaggagggaggggagcgtgcttcggatctgggactcgtagtcggggcgtgggtcgtagactgttatgctggtgtcggggcggcgcaggtgcattgctagcattgagaggccgattgtgcctaggcccaagagggcgattcggtgggggtattctgtggccatggttttcggatttcggaggtttcggtttcttgaaggtgtttggaatgggaggagaggaagagggaccttatagatagctacatgtagtttcggggaggtccgccgataagtggggactggaggggctatgcggcgccgccatgcggcggcggctggcggacctcgggaggggattgtctgtcgtgcccaggctctcnnnnnnnnnnnnnnnnnnnnnnnnnnnnnnnnnnnnnnnnnnnnnnnnnnnnnnnnnnnnnnnnnnnnnnnnnnnnnnnccccggaggggggggggggggggcggacctcgggaggggattgtctgtcgtgcctaggctctcatgagactccaacgcgatatgatgagggacatgtcattgaatcaagacgaattggcgtctcgttagaaccggtaagatcaatgtatgaaaccagtcggatattacgcgtatataccttatgtttctggagattctactatttttgatgctgtgtggaaaactgactctacgagtaggttttggcattccttgaagtcacccgacttccattttggggtcaagtccagattgaataatcacaggtcatgaaaatccaactcacatgccacagcacatagaacaatagagcccacagaagaatgggggtggtatactgtttggatgcagagcagcccgaaaaacgctgacccaggataattatattgtctccgtcttatgctcggacggggcgctattttccaagtccgcaaatgcaagccccgtgacttgatcgagttccataagctcatccgcgacgggtaaagattgcccaaaaatattatcccattcaccccagtcgaaattgagccctggatcgatcattaagggggcgggctcagaagcaggcattgcgttcggtccggcggtgtccaagaagttcaccataggagagttaacgagggattgttgactcgacatagtagcggcggaggaacgaccaaaggctgagtcgggagcaaatgctctgtcgcctgaggatagggggatatttgcggatgacattgatttgaagtaaggtgcatttgcgaaattggttgaccgatcttgccccgtccagggcaattctgggttcagaccggctttctgccaggcctgttggcgcagacgacggatcatgccccaggcctcgcggcctccattcctcaacgggcgttgtgtgaagatgtcatctccgccactcacgacacctccgtccggtccacaaagagacagaatttgatcaacaaatccgcgtgacacggaggcttcggggctatatggtcgttcatacaagtcgatgagaatgatcctagatctagttagcttggccacttaagtcgagctttcgacatacatcattgcatgcatgggctgatggttccttggtgatcattagtcaaattcttatttgaacaatcggaatgctcacccaggccagccccattgaaacggctgaaagtcagggtccgtcgccaatcgaataaacttctccatgaatgcatagcaatggcgtagcgcactatttggattagatccagtagcccaatgagtcgcgacacttacctttgtcgtgctactggccagattcgacttcgagggttcctgaggaatggttgatacgcaacacaaaatgcctacatccatgttagcgccgcacgggattttggcattaaaataccgaccttatcaatgaacaatgacagaatgatcttggtccatttatgaaatgcgacgaggactgctgaatgatattgctccgggcagccagatggaccttcaataggaagttccgcctcggtagaatgagaaactcgttttggagacactactgttctttccgttgccgttgtctctggaattcggtttatgatggagttgagtttgacttgaagatcgtgaaggacagagcggagctccagcatatcccctcttgttagaggcttcgtacccagctgaatctttagtactttacgaacagactctgcgaggaggtcagctcacgcgcctaacatttagacccaagatcactcacgggccattatgcattttgcctttgcgttcagataatacacatttaccatcgacggcccaccacagacagtcggattgtctgggttatcaggtggccgttggccgtcggcaacctgttgttcatatcttttggcttcggcagtacctaataaggtatccttgacctcgctggtctcacgaacgtcccagtaagtcgtatcagtaagcaatggcggaagcccactcgacatcgcaataacggcatccatatgcatgatatgccaccacactcggcgtcggaactctgcctcccatgggtcgatattaaaatgggcgggatcccgatgtaatcccaaggtctgtgccactctcactgctaagctaacaaacaaactacttgccaaaggttcttcctctcttgacaaaattgtctgcgcaacaagataggccgccagaccatgaagtgtgacgctgtggggaaacgaaatcttggccaaccaacaggtgacctcctcgctatactttgtcgagaggacagcgcgtgacgaagtattgaactccgtttccatcgttctcatagaaattgtgactgagcctccaaaccatatcgcgtataggagtggaataaaagaagaactagggcatggctcacccgtatagcttttgccgtcgtaccagtcccaaaaggctttataacgtcttaggatcgttggagggtgaacaatagggctcagtgagtggacaccagacatgaaacccttgtagagaatatcactctgccattttgttggaacatgctcaagcatatatggctcgaccgatttatcatttggtgataaataggccgatgggatgcaaacggctttctgaaggggttctgagaagccgacaggaaagggggagcgcgtggttcggctcgtagttcggctgctcatcgattctttccgctgtctttgcttgctagaaacggaatcggttggggtgtcactacaggttgctatatcatgcggctgattctggtttccgagcaattgattgagctcctccatttcatgggaaatataagcccaatacgttgtcccgacatatctaaacccaaggttagaaactcaatcgcactttagcctagtgtgtcgatactgaccttgacctcccgccatcccccaaagacatgtggcccaagtttgaagttcccagtggatcaaccagatccgtagtctggccatttggaatggggaagtcatcgctgctacagtcagcagcagcgctgaatggactgggcggttgcgcgacgatcgatttgctccccaaactgccgtcctccatcggcgccgtttggacgccagtatttaatgcagccgcttgcatctctgtcgattcgttcgcctggttatccttccgtagtcgctcaacgagcgatacgagttgagccagatgggcttcaactgcgcttaaatctgttttttggccttttgataatgatccctgcctcgctcggtcatagatcggcaggggttcatctgtattttcctccgactgtgggatatctctctgccgtttggctctcactcggcgagtacgtttggctcgcatcccatctttctggatctccgggtcgtaggcgcattcggtaccatttttcgcgcagtttccgcatactgggagtgtctaacaagaaaatttcagttcaggcaacttggtcctaggccagaaaaggttaccttgtcgcatttgactttgcgccgacgacatgtttgacagctataaatcacacgttttcgggtaatgtgtggatttcctggcgccgagggcgaccttggcggttcagtggtgctagacgggttggagggccccaccacaggctgcatattcggcgtgcttcgacaatttatccgtctcttttcattgattccgtccagtgaccaagtagaaggaacatggaaataatcaaagagttacgtgtgggacaatccaacccgcagatgtcggggataattgcgttggtactccgcagtgggaacgatcttggcactctgacgtcgggcccaggttaccaggtggattactcagcacggtctggacgaatcaacctcccacctggaaacacgcatcgattatttgacctaatatgccaattcgttctaaggtcaagaagatctatagggcaagagagtaggttattgcttatgtttgaggatgtccagaagcaaaaaagtcgctcacttcaatacacgacacttgccgatgggcttcatggtcgtaccaatcgatgatacaccaattgtcatgagaaggcacttctgaagaatcgcttctggaattaattgtaatatactgacgtggagtagcacataggctagtagctgtccgagaaatggccaatgttctactcagcaagcgtggttcaatcggctaggcctaatccaatggcctctcattcaatttcaagattggaattttctaattcactaactactcaggcacagtcccgcattccatgaaccatgaacttggcgtgtttgttgtagtttgtcttcccaattccagcaaagccccagaggcaccaaaactggcgacgggaagatgttgtttagccgaagagcaagtccaatgggtggtcttttgtccccagtgtccccagttccgtctactgggcttttcatttattgccagagaaggtgataccaggccaaaattgcggttggtcgagtatggtatggcgttcgggatattggtatagtttgtaggaatagatgtcacctcacatttttgcgccagggcattgtaaaatgtacatttcgcagccgacattggcgataataggtcacgaatatctcccacctatgctttcaaacgaggtacatgtacggagtaggttgtttaagagatagaaaggctgttactgccgttcctgagggcaccttccccactaacccccaccaacccccactgcccggacaatggccgtgctttcgtaacttggaaggaacgatgagacaagtctgagatctattctaatgtgttctcggccgagtgagtcattgttcttgggctagcttctgctccttttgtggacctaagagctaagaagaccgtcgcgacaatgtacaacatacaacaacagggcagggccttgagtctaagcccagttataaggattccacattttacaaagtacatgatatattgtagtcggagtaattgttactgccaatccccatcggaaccatgtcaaatccgttatagcttcatcgtagatctcttgctagcacccaatcagagccagggatggtagatgagatctgggacataatctcacctcatctcaactgcgagcttactctagatctaacaacgggtctaccccactctcggttcagcctcaaagcttatttgtgatcatctccaagtccgagccactgcgtatgttgtatccttatattgtggttgtttttcagctcccctttctcggatgatgacgaaagaagatcgtgattatttatcgtacgacactcgcatgtcacatccgctttcctgtttggctagagcgtggttctcggccggatgcttgttgacagaatggtgccttctcggccgagagaatggcagcagccttctcagtcagctatgtacataactagtcactctgtgagcgcacaaatagttcggcccccgcattctacgaacccgacccgcaacggtataccgagagagttatgatgggtcttcaacaccgaagacttgtatcatgatgaaatttatggagcccagatcgaaaagttcttatcaatcaacttgcaattgtaagtgcatagggctagcatggtgtattttgtgttgacttatccgatcgtcgtggcgttcggtgagtgcccagtgtacaaacctttcgggtttagactccatacaagcttctcattattcttctagtagctagcttctttttcgccacaatgatgacaagcgttgggggccctgcctgcttattcagaacctgcagcctatgtacccgtacgccttccttcacagcccaggataaactagtagaaagtgaaaatatctagggttaacatattcatcgtagttatgcaagtataagaaagaagctagagtatctatgtttctctccggatcgtggcggaccaaagttgttgactatgaaaaggctattcaacgagatgacgtcgtgatgaatctcggccgaacatacatgacaataaagaccgaacctgcttgtagctacactacgaacccaccaattataatcaatttcgaagagctccattaatatctcaagctttgcagttccgcaagtataaaagcagcttctattccccgattcccgccatattcatctacaatccacggtccattcacaccacgtctactcaacttttctgttatttacatcatcaatcatgtcacctcagcaggacagcagactggagagcaagtccattgctcaacctttggccccatttacatacgaaaaccaggtgtaccaagccggtctctcgggccagaagcccccgataaccttcaactgcggcgattgggaagccctggccaaagatcgtctctcggcagattccttcggatatgtttggggttccgccggaactcgtgagacagacgacaacaacaagaaagcttttaagaaatggggaatcgtgccgtcacgcctagtcaagagcggcttcccagaccttaaaacaacacttttcggagagacttttgactatccgatcgccatggcaccggtgggcgtgcagcgaattttccacccggacggagagattgcgtcggcgaaggctgccgagcaggaaaatgtcacctacatcctcagcaccgcatccgctacaagcatcgaggacgttgccaaggctaatggaaacggatctcgttggtatcaactctattggcctctgagtgagaacaacgatatcaccgtgagcctgttgtcacgggcgaaggcgtcgggttataaggtgctggtagtcaccttggatacgtacattcttggatggcgccccagcgatctgaacaatgcatacaaccctttcattcgtgcagacgacattggtgtggcactcggattctcggaccctgtataccgccgcaagttccaagagaagcacggaaaacccattgaagaggacgtccaaacagcagccgcagaatgggcacacaccgtattccctggtctaagtcacggctgggaagatctcaaattcctccaggaacactgggacggtccaattgttctgaagggaatccagacggtggcggacgcgaagaaggctgtcgagtatggcatgcagggaattgttgtctcgaaccacggcggacgccaacaggatggaggtattgcgtctttagatgttttgccagagattgtcgacgccgtcggcaatgatttggaaataatctatgactcaggtgttcggtctggtgccgatatcataaaggcattggcgcttggtgcaaagatggtcttaattggtcgtccctacatttatgggttggccattcagggtgagcagggagtacgccatgtgctaaagagtctcctaggagatttcaatttgaccctccacctgtcggggatcagttccgtgtctcccaagcatctgaaccgatcggtactgcgtcggacgggcaactgaagatttgacaattagatgataagacgatcactccggttatacagtttcagtttgaatatatagaatatgttctttgtattaatatcaagtactatagatctattcaaagggcatgaagacaactgatctgtgcagattcaagagtattctaatacaccatatctcctttcaaaaaggtggagaccttataaatatacagcagagtctatattcattttttcggaggtagcctacgctcatagccagtagtacgttggcgtgccttttgttgcaatggttgagtgtatccggagaagagtccatgatgtaacaatctcaaagattttggcaatatatatcggcggacaccaaccttccattactaggtactgcaaccacgagggcagcctttatcgaaaacctcctttctgttagaagtgaggtgctcggaatatgtatgcctaactcgtcatttgacccattgacgggaagatctagatcgtggggtggaaatataagaaagtggtttctactcccatctagtcggagtatttttccatgtcctcacatagttcctccagatcaacttgatatcatgaggatagttgaccgacgatgtttgtcaggaaatagggcaggaacttgccactaacgtctctccgctagcatagtaagaatgacgaaattttgtaaggttccttccaattttagcaagtaactaggtaactggcgtcagaggcctcaagaataaggccagaaatcggtattgagcctcataaggactctgacataggtgctgtctaacataagcttacgcttctagtctgtgaagtcttgctaatattctcaatttagattcgctcctttgaaatttatccatctatctaccgctccaaattttgtaaagtaacatcaagactcaatgagtagccttcgatatccaacttttaatcactgcagaacagatcctcggcagccctatcacccgtagtaatacaagaccaagagtaatcattgctatcagtcacaacgccagcaccgacattatattgagcacaggtcgtgttgccagcatactggttcagccaatcaacaatatcatcgcccaagttgatgtcttgacccgcgttagacgacaccctgcaagacatagcagcactcggctgagatagggcggacaggtcgaccgacgatgttgtgttgtaattctcccgaggcaggttatcgagaatacgacgcacagcactgccaggatggtcacagacttggatatgaatctgctcctcggagcgggtggcgacactgttgatcgcaagtgttcctgtgtccctgatacctctggtgttgagtgtatcctgaccaaggcggaagcccccgtccacgtcagcagcggagctcaattgaagaatgccggggatcaagtccgtcgtggtgatcaagtctccactgctgaggaccacccacgaagctgactggttggtccgaggcgggccaacaggaattggagggctggcgatgcaagtcgtctggtttccggattggaagtcttgaaggcaatggcacagactggagaaccagatgaagcagccgttgcactcggaattggcgtcgacacagcccgcgtcacattgtgagagctgtgctcgcggtatcacgggtgacggcgggggtggagggttgcaggtgatagggcattgtcccgacggtgtaacgcataccaggtcattgggtgatgctgggaaagtcgaagggcatgtacagcccctcacgtcccttctggcaatgtcatcggacgtacacaggcgtccattctgcgtaccattcgtgggatttatgccattcgtggcattgataaatctctgcccgaagaccggagtcgccaggaagagagaaagggtcaatgcaatgcaatgctcatagatcttcattgtgatagatcagaggtcaattaagagcaaaataattgaactaaatctgcttttccagtacagaggcgacttgttgctgaatatttatagcaagaatcaacagaagccatgatgtaaacctgccgtataggtgtgtcagccctatcaacctcacctttaatgcaatcggctctcgtttccgtggagattccaaggttatcgatcttgacgtccaatgaaaacatgtctcacaagaagtacattggatcatcgccgcatatcattgccgtcgtactgttcagtgttcaaaggtccgggggaaccagagattgactcggattcattaaccgccgtctggtgcttgtttcaagagatttatcaagcaagtcattagttagcatgggtgacctaatgaatcaggccgcaaccctaccccggcgttttgcccccaacattccaaattctggggttcttagaatcggattttgcacaatgaaatccataagcaaacacttagagagcataatgcaggactacacggagacaaacagagaatagagtatacgaaaatccatgatttcatttcaatatcgtcatgaggatataaagaccataaaagctttttcaaaaatcgcgagatttagttaccgagcttctggcgggcgaagttgggcagaacaaagctggcgcggtggatgtcctggttgtagtagcggcagagcttcagctcctcctcagcggtccaggtgcgcaggggctcgcgcacgttgcgggtggcgtccttggagcagaccatgaagccaatctggccggaggggtaggtgggaatggtggtgtaggcgtactcggcgacggggaagacctccttgcaggacttcttaagttcggcgatcatgtcaaggtggagccattggttctcggctgttagatataaagcacagctccgcaaaaccgagcccgtaaagcgggttggttgcggggtggtgcgaaagaaatcagcatgtggtcaatttttttttgtgtgataataagatgaagggaatgagcaatcaaggaaggaattgggcaagaaaataagaaagtgacgaacaaccttgggtagtgatgacacctccgtcgcgaagggcagacttcagtagctcaaagtagggcttctggaagaggctctcagcgggaccctctgggtcggagctgtcagtgatgataacatcgaactcgttctggcggttcttgaggaactcgaagccgtcaccaacgtgggtgtgggcattggggtgctggaagccaatggccatgccgggaaggtacttcttggaaacacggatgacagcctcgtcgatgtcgcacagggtggcctccttgacagaggcgtgcttgacgacctcacggaggacaccgccgtcacctccaccaatgaccaggaccttctcggggttagggtgggagttcatggcgaggtgggtgatcatctcctggtaggagaactcatcgcgctcagtgcactggataacgttgtccaggacgagaacggtaccgtagtcgctgctctcgaagacgaggacatcctggtacttagacttctcgtggtggatgatttggttaaccttgaggctcatggcctggccaggccacatgccggacttctcagagaaccagccatctgtagatgggcgtcagcatgttcttgcagcaaattgactagtaggcggggtaatggaggggcttcacacgtaccctgaatggtggggtgggtgagctcgctcattttgatagagaaagaagagaaacaacggagaaatttagatgatgagtagaaagcagaagagagtctggggagacgaagcattcgaagaaaaagggcacggcggaagttttgctgttttgggcgaattttttgcttcttctcggcttaagtggggaaccgctgctgtgctgccaccaaaacccaatatccgtagaaacaggatgaaacccatcttaatgaagataataggtatgggttgcctctagtaacccttaattgactgcaattcgacccggtacacatgccccatacccataattgggtatggacacctcagggaccaatagagagcccgagaaagacgcttactcaggcttgcctttgaatataagaaaatagagccctttcaagcgcaaaaatatggtaggtaaaaggaaaatcaaacggtcgattgctttctagttactgtacaagcatacagctcccccaaagtgcagagtcttgggtgttcatgctctgttataccaatccaacctcactccacgaaacaaaattgaaataatttactcttcattgtcaccctcgagaagacggccgggcttggagttcaggaactcgttgctaaagcaccaaattagcgcacagtcgaagcggctcctaagggcattcttaccgctcaatggcccagttcatggcgacgtatgcgataatgaaggggggagcaacgtaaagaacctggtggcggaaacgacggaagacgttgaagatagcagcgtgggcggcaccggccatgggacgctgacggttaggggacagcgagtaggtggcgatgcgctggggagtcgggcaacctgtaacatggatattagcgatccgctcgaattgcaatctcctttatttctctgaatatgtctagatcgatccgatcttcatatcgcataaggggtcggcctcctgcgtatgcatccggtccatagaggttcaagggttattgtcgaacgtaccgaactctccccagttgccgatgtagctataagaagtaaaaattgtcagttaactgaatgagagacgcagaatacgcagagactgttaaagcccgacccaattggcatctttaggaatttgaattgtgtagccgggcggccaacgcatccgggaggccggtactcaatccacgacgccaggagcatgggcaaaacgacttactggccgttcttgggatctacggagtgacccattttgaaagattccgagtaaaaagagaggagtgggtggaaaaggtatggaggtagcgaaatgagtgaggaaaagacgaaggtcgggcgaagttggaggtttggaaagatgggcactaaacccaatcgggaacactcagagtgagcgtcgggaaaagcagacatcatctccatcatccgtcttcatcaactcgacttccacctccaaccatggctcaagtcctccaaaatgtttatcggctggctgtccccgtggctatcggtggtatgctagttcaaaattccctttacgatgtcaaaggcggcacacgagctgtcatcttcgatcgagtgtctggtgtgcaagagaaggttgtcaacgaaggaacacatttcttgatcccatggttgcaacgcgcaattgtttacgatgtccgcaccaagcctcgcaacatctctaccacgacaggaagtaaggatttgcagatggttagcttgacgctgcgtgtgttgcaccgcccggaggtgccgaagctgccgcagatctaccaggtgtgtatctcatatgatctctcaacagatacctaagggaaagactgacccagagttatccagtcatacggtaccgattacgatgagcgtgtcctcccgtccatcggaaacgaagtcctcaaggccatcgtggcccagttcgacgccgccgagctgatcacacagcgtgaagctgtttccaaccgtatccgcactgacttgatgaagcgtgctggacaattcaacatcgccctcgaggacgtctccattacacacatgaccttcggaaaggagttcacacgggctgtcgagcagaagcagatcgcccagcaggatgccgagcgggcccgattcattgtcgagcgtgccgagcaggagcgccaggccaacgtcattcgcgctgagggtgaagccctgagtgctgaaattatcagcaaggccgtcgctaaggctggcagcggactgattgagatccgtcgtatcgaggccagcagggagatcgcccagactctgtcctcgaaccccaacgttacttacctgcccggtggagaaggaaaggatggaaacaagagcactagcctcttgctcggtctgcggagttaggaggttataaggctgtttcggggatttatgggccccgttttcacaactcatcgaatgtaccaattaatcgcaatttttgccgcgacttggggccagtcttgcctcgtgccgtgaatttggagtggtctgaactataccaccttcctatctgtagcaataccatacctcactccacaccacttctcttttagaaaaaacattctgaaaactcaatcgtattgctcattaaatggttaaatggtgatttatatcgtgatatagaaaacatcagatctacaaacgtcgatacacgtgcatttggaagcgcatgtcttccaagcctgctccttcgccaacttcataccgcagacgcactgcgtcccgtctccaccacctcgagtcctgagtgtatacgcactcccacttgcccttcgccacagacagcagcgtgtggtcaagcaagaacttcatcggatagttcctctcttgtggttcaccgtccggtccttttcctaacttcaaagttgaatagctgccaggactatcaacaaccaaaagcaccgcaccagcaggaaggatttccgtcattttgagcaaaaaaccggtagtctttggcatggaggtagaaaagagctcattcaaagtgaacatgataggaacgaggacggaagtgaaaggagaagacgaggaagggccgaggagaatttctttgaggtcctcctcgggaagagtcaggacatctccgcggcggaaagacacggagaatgtttcactggccactttctctaagagcaaggggggacgatattttgttgtctgcgaaaatggcacatcggacgaagtgatggttcgtgaaagcctgtcaacaacgtctgcccagtttccgatatcgacagccatgacagagagactgggtgcgctgactccttgatctccttcttctgtcttcttctcatcttgagattccatatctttgttttcaagagacacgctggcaataccttcctctagcgactgggcttgggaccccatgtctctccacgcagctgcaagagcagcgatctctgcaccggctccgccaccaatcgacacaacacgggtgcagggattcttgcttctagcacggcctcgcgtgttttcctcctcctctttcatccaagtcaaaactcccttcaacaggcctgcatatcccagtgaccgggacgcactccagcgcagggcatatgcgcgcagtagatcctcgcctgcctcggtgaaggcagagtcgaaatcgcgctgatatagaagtcccttgattgtctggatgagagatttaatatctaatggttcatctttattttcgtctgattgcgattcagtgaggttggtatcctggcttgcaggttccgattctgcaactgggttgcccaggagggctgttttgaatacgtccaagagcagttgctggagggtaagaggaattgtgctaacaaggttaagtccagaggactgttcttcctcttgttgttcggcttcggctttggctttttcgacttcggctttgcgattggcgtgctgtttgttcgctggtggcgcttgtttttgcttttgcgctttcgcttttggacctggagatctcctgcggtttccctgacgtggggcgtgaggcattattatattcgagaagacactcgtttcgtctagtcctttgtaaagaatatgactgtcttcatcgaacgtggggtggaattttgcactttttttccttatcgttatcggcgactccactataaaggtctataaaccccccgatctgtattcgacttgattgttggacttgttcgaaaattttacccttaaactttggcgaaatatgatggctagatgtatactcgcccttgttgcattacatgagcttgtctccatcaagccttgttgaataatgatcactatggaaatccttctagtccagagtaaaagcgccgagcacgtaagcgtcctaaatacaatcaattggacaaaatatgttgatgataaactacaaaaccctggctgagctcctctcgatcaatttgctacagtgatgatatagaatccctatcatacgacgttgacgctgtatatcgacgcagggttgtcaagacactgcatattctccaaggaaaagccacatgctgacaataaataaactaaaatatacatgactacaaacgtgatcaatatctcaacttggaatttgtgcaccataggaggcttgacagagagagttgtcgccctgccaacatggcccggcgcagctgggcaatactgaattgaaacaccaaacctgacagtttaggggttcaaaacaccccattatgttgcctctcagtaagccttgctgatctgaaaagctatgaagactgactgtgccaactattttcctaaaaataggacactttggtcgctagtacgaaagaaacactcattcccccaggattacgtgtgacatatctgtgtccgagttggtttagctactcatatatagctattacattatacgtcactaagtatatcgaaccgtgcacgtttcatagtcagggtcgggcgtcaagaaggcaataagtaaagatatatgtgcgttgcaccagagaatatatttcgtcggtcattattgccaaccttgcatttcatctccacggagagctcttttgtgataggcaaccaatagaagaaacaagctacacggatacatggcgtgctatatattttgtccttattattaccaaaccaacttctgcctagagcactgcccacatctatgagattccacgagattccaaactctcatccaaagccacatgaagacaggaggagagttttacctgatcaacacgataccaacgtaccaatgccgtccgtcatatgatctcgctcgcgtcgagtcgagagccgaacgcgcgctccacgtaagaatgagtcacagactagtgctgtaagccaaggagtcataactatccgttgcccgagcgtactatcatgcctcatagcctataggccgccgtgggaagcagcgggctccgttgggagcccgtcaacnnnnnnnnnnnnnnnnnnnnnnnnnnnnnnnnnnnnnnnnnnnnnnnnnnnnnnnnnnnnnnnnnnnnnnnnnnnnnnnnnnnnnnnnnnnnnnnnnnnnnnnnnnnnnnnnnnnnnnnnnnnnnnnnnnnnnnnnnnnnnnnnnnnnnnnnnnnnnnnnnnnnnnnnnnnnnnnnnnnnnnnnnnnnnnnnnnnnnnnnnnnnnnnnnnnnnnnnnnnnnnnnnnnnnnnnnnnnnnnnnnnnnnnnnnnnnnnnnnnnnnnnnnnnnnnnnnnnnnnnnnnnnnnnnnnnnnnnnnnnnnnnnnnnnnnnnnnnnnnnnnnnnnnnnnnnnnnnnnnnnnnnnnnnnnnnnnnnnnnnnnnnnnnnnnnnnnnnnnnnnnnnnnnnnnnnnnnnnnnnnnnnnnnnnnnnnnnnnnnnnnnnnnnnnnnnnnnnnnnnnnnnnnnnnnnnnnnnnnnnnnnnnnnnngagcccgtcaacggcggtcttatctcccgactccgacattctagatgtggatgccgccagcggggccgcacggtctcagagacggccgtgctcacgaaggtctcacgagagcttcgtgggtctacgaggcgatgggacacgggttgaaagtggtgtggctgaaatgtctgcctgagaactatcgctatagcgtggaagcctgggtgcctcaggaataaatacttgttcacgcccatgaacatcattggctgccttatacttcggctgtgcatcccgaattcaatgccacgaagatccatcgcgtttcagtgttagcagatggcctcttgaggatacagagtatagataggataatttgaaacatatgaccatatcaagaagatattattcgtacaatttgtcaatcaggaacaaagcgaactaaacgtggagttggttggtagaagcgagtaacgcaaaggatacatcgaaccaaacatccgggtatatgaggcgagataacgctgtaaaccgcctctggagacaacaccgcctggcccatacgaaatcatcaagctaaaacgccgtaaagagggaaggtctccctgaattctcaaatctttgcagaaagcaaagaaagcaacttgtgctcagaggatatccatggagaccgaacccaaatgctacacaaaacaagagggaaagcaaagtaaaaagaaaccaccaaacaaaacgaaaagaaggaaatgtcgcaaattttttgaagcgcatttactgcctcgataaacgcccacaagatgcataggtcaaatccgtagacgtttcaatctgagaaaagcaacccctaaacgggaggggccgcagcagactggggagcgggctgtgaaagatcctggagttcgggcacgggaggagactgctgagggatagcctgctgaatagtggtgacgattcgctccagctcttcaaggcgacgatccttctcttcgatttcccggcgaagtctcttaacttcgttgtgcaaatcgattccggtcacaggcagatcccggagatctccgctgggagaatcgtggcgccgcttcattccagcaataggaagaggtgaggcacccgtggctccctcgacaccttcaagttcaggggggcggtcccaagacatatcgaccatggcaggagcctcgtcattgtgcatgtggcggcggcgaagatgttcgcgcaaattttcttggcgcgtgaatccattaccagtgctgcggttgcaatcagtgtatgggcacatcagggccttcttggtgtcggtgtttttcttgtgaacttcgcgctggtgacgtaggagaccaccagagtaggtgaaaccttggattttgtcacagttaggttcgtaacacttgtagggacgatcatgtttgtccatgtgtttgctacagttctgttagtactgggcgcgttaagaacacaacaatatgacattttacttacttccattcgcatggacgtcggaaagtaggaggcgcagattgacactcaacatgatcgcaaaaaatttgaccttcagcgttcttaggaggatcgcgagcgcgtcgaacagaaaggcgcgggcgcgcgccctcgaggccgtaggtcataggctgctgagggtcgttcattctggcaattgggggtgaggattcaggtttagaggcgaggattgacgcagcgagggcaccgtcaattccttcacttcgtgggctaggatagtcagacccgtcgcccatattttgaagttgataccccacactactgaggggatggtgatagaatgaagtagataccggaaagacgcgtcgtcaatgcacaacaacggtaaatttagaaacacagagtaatggggtcgatggaaacaacaagaatagagttgtttatgaaaaaattcaaataaattggccgtgatagcctagtagatgttgatgggtaaggcttcgggagaagatggaggagttgccaaaattttcaggtagcaaggcatccgcagcctatttataccgcttgcgtcaggtgcatatgcgccacccctgtggcgcagtaatccttattatatcagcaaatttttgcttctttcgtttcctagtggagtttctgggcaactagattgtcatatgaattcataactggctagagtttatatacatgtgggttaagatgtggaaagccgtctattaatgcctggtggtcggatatcgagatgagggggcaaggaagcaagtgactcataccctagagagataccgtgggtatgactgtgtactatgtacggagtacggccaatcctgttgccgtcggcgggcccaatttaggtatcaaagcaagattgcctgtcaggcagctgtccactgtcctctgctcaggtggaacaatatttgatgttgccacagattctgacaaatttagtggcggtgaattcacgtgatacgtagtgattggtccaacccaaatcacgtgcgtatcaaatataaatcgcttatctaagcattggatcgggcagcaccagggcagtgcctttttgcaatgtacgttcgccatgcccgatgttaggctacaacaaactttttatgcttgacaaactttagaattgaatgaactgcacgtccatgtagttgattgttactattaaaaggaatacgataaggtttcatgtagtaggctttgacaacttcaaccaggcgatgcaagctcgcttaagaaggatgtcggacgttctacaggattccaaagtatgtaccctataaacaacgtagttcatatggatatgcattaaggccaagatattgggaatcttgaagcctacaaatgatcctacaaatcgataatactaggaaattttgccacacagtgaatatggcttttataccatcttcatagagaaaatgaatggcaagatgcaatcattccactccaagactatgctacagggcagtatagggacttttgaatagtatgtcatttgtttcatacaacatggagaactaccaaggagatgaattataaaggctagctaacccccacctctatcatattaatagaacagcatttgatactacctgagcctaaatgcacgttggcctacttctgagtaaattgctgcccatttgagcatgttgttcgaccaagcaatggactatactacaacatagcctccagatcttccgaaagatgatgcccaaatcgctaaagtagccaccattcgacgtggaccaacaggcacaggtgtaattgaccacagatacccacatttacgtcaaattttcaatgagttcatcgcggtgtcaaggtgagatgtccctagtgcttccgtagccccaccgggtagttcgaaggtatatccggcgctcattctgaatattttacttgcattttctctcttcagccagttattctagatcctaagatgccatggaattatcaagcaatataaataatcgacacattcttcgatatgtggtttggcacgtgaattgcatctggcattatttcgttgcggcatttgtgctacaggctcgggaaccatgctctgctccaccaacctcacaacttggcgcccttcgaatttttatatccaaagttgcatacgttcattcgtgccaattgtaataagatcctaacacgctagggcacgaataatatgcgccattcatttttactccatcggggtcgaggcctttgctgggcatccagacgcgccttcagtggcgctactcatgcacaagcctgccatacagagaaaaagcagtgctcaaagagcatcgagcgcgagcaaaagttatctcaagccccaaaatgtgccaaaactccgcccttgcaaccccttccgacgctcagtcttccattttggacctgcagatctacctggaaacgagcagggatcaataccctccgctgtttggtgggatgtacaaccggtgatttctcctcgctatggatcctacagacctactaccccgagatgggtatgagcagcgcaatggccttgtcgagtgggttgcctccttgaacggatctaattgtattgggtcttgcgtgctaagaataatcatctagtggcatgcggtatcacgacttcagttatcctcgagacaattctgctccgccggggggctgaccagctttcctggccgatggccgctcgtactgctatgggcatgagtatggtttcaatgttggccatggaactagctgagaatgcagttgactatcatctgaccggtggggtagttgctcttggagatccaaatttctggctggcggcaatgttatcgatcggtgctgggtatttggcgccgttgccgtataactatctgcgtcttcgaaaatatgggaaatcttgtcactaatctccatgtacctatgtagtttgctcacctttacggaacaaatcagtttaatcaactggttcttttgtttatgttgaataccctggctgattgagataatccatttataggcggaggcgttagataactcggaggataagctgacttactgtttttttgtctatttcttacttacgatacggaaagaagggtggaatcataattggcattgtttgtttaagctaatacctgactatctaggatataaagatatcaagtatgacacatggccaaggggtaggggtaaatccacagaattgcacggtaattgctaccgaggttatctgagctgggcatcgacaatcgacgggtgagttttcagtaattccttcaaccggaagatacttgaggatcattgtctgtggcttcatccctgaaagtcacgccttgtaaaattccacggtgacaatggtgagggttcagacccagggaacaatccttcgacggacagaacggtgctctggtagcaggtcaaaaggacccggggataagcatccgaacaatcttggggttgccgatccaaagtcctggtcggcataaaagaaacgggcgagcaaactctactggaaagaaccctgatagtatgcacggacattgcttcgccgagtggtaagacgggcgaacctgttaaaggttgccctgggaaatgttggacacaaaagtcactcagtcatagttgccaccaacttggctagcgaaagcagtagagacgctacgggcatcatcgtcgtcgtgcgtgttttggcccggcacgccgcgagtcactcgaatgctagcggagctgcctccgaagatgctgccgttgtccggaactccagccctgtaaggctcgcgtcctccagactcgacatagcgcttcaaacggtcagattgactgagactgggctgcttgcccatttcattaatgctcaggccagtgagactgacaccgccttgatcaacgctccgtccgtcagtgacgctggatgtgacatcggactcagtggcagcgactgactcgccagccacactgggggctcccttgggtcgcccaccgttcgctcgacgaccgccagagatcgcaggccaggactcgccaaaattctggaacataggggggtagccagatggaaggccaacaccaccaagtgccgagccatgaacagaagatacatcgtcagggatatagcccaccacagaccccgagtcatgatactcgttgcggtgaccaccgttgcgaccattcactgcattatttgggccattatttgtctgactgaaagacatctggaaccgctgcgggcctctgtatgcttgcttgggccggctgaattgaatcaaggactcctgaaggttggaaagcggcccctccacaagacagtggcgttccttgaagtgctgcaaaaggcaattccacaatgggtgcttagacaagaccttggggtttccgaggatgaccaggccaaatcgagcacgagtaagggccacgttgagacgacggggatcgctcaggaaaccaataccttggtgatcattagaacgaacacaagaaaggataatataatccttctctctgccttggaatgcgtcgaccgacgcaacctcgatctccttgtaatgttctttcttgaaggtaccgtttgcctgcatagagctgacgatgtagctccgctgtccctcgtatggagtgatgataccaatatccctaggctgaacacctgccttgaagaagcgagtgacaatcttctcgacgttggtagcttcagtacggttaagatacgaggtgccagacgcggagatttcttcgttgcccaggtttgaccaaaacatcatcggatcatcaatgatgggccaagggaagtcaacgtcacggcggacacgatctgcaatggtgataccgttctgcagcgagccttcatagaacatattggatgggaattcggaaaggcacgggtgcatacgatactggacattcaatcggataggagagcagcccaaaatcacgagacgctcgaacaaagactggttcagaccggccttggcggccttcttgttcatgatcacagggccaagttgctggtgatcacctaccaagaccacttgtttgcagcccagaactagaggaatcatacactcgggctcagcagattgggttgattcgtcaatcaggacagtgcggaacttgccctttgaaagacgaggatcacctgcaccaacacaagtacagcagatcacatctgcgttagtgagaatttcacgctcagcagagcgagtaagttgcttcaggcgcttttcgtcttggctggacaattccccaagttctgccttgagctggttgagttttaccagctcaatgttgctatcgttcatgcgaacctgctcgtgcagcgaaaggaaaccaacggcagattccacatcttcgcgagatttagcagtaactcgtacggtcttgagacccgtccggtgaatacgttcgcagagctgatcaacggcgacgttggatggagcgcagacaagaacttgacctccgttgatcttggcaagatgatagataatagtggccgatgtaacagtcttaccggttccgggaggaccttggatcaaactgagaggtcgttggaggacacttttaactgcgttaatttgactgccattcagatctggtagacctggaacactaaatttctttggaatctgggtcttcataggagctgcagcaacctcatggccaaggagacgatggaaaatgtatcctgagacactctgctcatctacggcaaaggtcttcatagcacattgcatgcggtcgaaggaagtcgacttccagacatagtcggccataaaattgtgcgtgcattcggtgggaactgacttgtggtcgcccttggcgcgaagttcaatagtgacctcatcagattgattgttcggaatcttgatgacatacccgacaccctcccacttaggacgcaattcaccattgtacttgatgcgcatctcgtcacccactgccaatttgacatctcctagctcaagcttaggcagcacaaagcttgctagatgcttgttgttgagaccaagatcccagcgcacgatcaatccatcttgggattgagattccttcaacttgcggtcgtaatcagcctcgatcttaacaagtgggccgaaaatattttggtattggaaagcatcgtcgtagcgaagtaggactggcgcaggctcatcatccactgcggtggccttctctaggtcttccagagtcgcctgagagttgtctttccacatttcctccagtttcgcaatcaattgaggactgaggtgacgagctcggagttgttcttggtcagtaggtgctcctacgagccaggggaggaaagaacgatcctcaataagaggctgccatcgtgaagtgtcccaattcatgtccttggaggatggcatagaggcacatggctgccgacaaagcaggacaacaacagtatcggattttgcggggatgaagccaagcaaaaatacatttttggtgccacagttgtagcattccagaatagtatctcctaaagaagagcccgggtggagttggacttccttatgacgagctcggacaaggtgattgacgatatgggacgaagaagtattgccacgtgcactgcagaaccacttattgcaagcaagacatttgacgacgctgctcgcgttgtggatgccgcagtatctataacataatcagtaaatgcgatccactaagggaatataaacactgacgcgcatgcatgagcagggagctctatttcctcctctccatttccttgggacttctgattcccatttgcgggtacaccgactgtgctttccatgtcgtcatcttcaaaggtttcagagccttcatcttcgtcatcatgtcggcgtggacgtgcgcgcccaagtgcaatctcattaacgtcaactcccgccgaggggtcctccggttggtagctcattatggataccgatttggaacgctgatagggatgactggagctgatcaagattcaaagcaaaaagcgaagcaaaaagcagttgaaatcagaaatgaacttcgcagtcgtaagcgatttaaggagcgtagaggacaatccggtcgtcctatgggggtgttcaaggtttaaaatctccagggtgtgcctgaggggcaaatggatggagatctatatcaagatgtacgattagcgatagattattgagaaggacaggtgagcacatacaaccagtccagctctctgtgtcagaggaccgacaaaagagagtcgatgagtttgtcttgaaggatgagcaaaaagtgttctccaatagcccagattctttatcggtgggatcccactacggcgtcccgtaccaaccataaacgcagccccggagttaagagaaaaaaaaagttgcccgctcttctttgcttaagccacttttactcaatcttcaatatgctggtaagtgaaggatagatttgacatatttgacattatgacttacaatcagtagcgccgccaaactcgcgagcgccgggattatctctatcggagagctttgctactccgtgatgcctcgattgcagaaaaaagatcccaactcaaggcttcattggcttctggaaagcctctagatcctacaattgcaaatgataaatcgcttcgggaagacttcaaatatgacgaatcgaagggaaatgaagacgctgagatggacatcgatgatgaatatgttttaacctccggcattatcgacccccgtcctctggttaccacatctcgctcaccctccgctcgtctcggcgcatttgcgaaagaaattcgccttctccttcctacctccattcgcctcaatcgtggaactctcgttcttggagatctcgtctccagcgcaacctccgcggctctgaccgatatgattctcctccacgaacaccgtggtaccccgactgcactcacgatttcacatcttccccacggcccgactgccagcttttcccttcacaacgttgtccttcgtcaggatattccgaatgccgcccgtggtaccgtgtcagaaagctacccgcacttggtttttgagggattcaagacgaagctgggtgcccgcgttgttcagattctgaaacaccttttccctccgcgcgagaccggaaaggttggcaaccgtgttgttacctttgtgaacaaggacgacaatatcgaagtgcggcaccatgttttcgttaagactgggtaccgggatgtagagttggccgaagttggacctcgcatgacaatgcgccttttcgagatccgcggaggtactctggagaagggctcgagtggcgacatcgaatgggcccttacccaatacacaaggaccagcaaaaagaaggaatacctatgattctttacgaactcgcatcaggctgtggtgtggatggttcaggcaaaattcaatcccatcattgttggtcgactggcgtatatggcgttagagggcacttagaatgggttcttttgtaagttagttatgatttaaatggcagtggagaatgtctaatcaaaatattaaagacatgtacagcagctttttgagaccgtggttgccgctctgtactttacgagactatgtgtatattattctagcatactggtccctccttggagctggagtgaccattgactttctagggctaaatatgcagcgtgacccgcatcccccacttttacttctatcaccttgatgttgtaggacgaagcctgtgttcgtttgccttacttacgatataatttcatctttagcggacagctagcagcttatatattgcccgtagatctaaattgatcaactccagcatgccaacacggaagggcttatcaagtttgatgagattcgcgaattaggcctcatcgctgtcctcctactcaatgggaaacagtgaccaaggatgcgacaggttgggaaaggattgtttccgatgaatccgttggccatttttcatattcattttaagttgtaccggtactttgagaatatctgccatcagttcacccagcacagtaatctcacaagtactatcgaactttctatatgatcttggaatatcactcattttgaacagccccatctcatgtttcataaaaggagacggcacttgtctaagcgtgacaccatccatatgtagtatgattggtttcataattatcatgggaagcatttctgaaagcacgagaatagagggcatgtgtattacgtgttgttctaaaatcatcgaaattgcattcggcataaaacctgctcttggcgtgacctgtccatgtgcatcggggaattcactcatgagtgcaggtgttaaccacctggagggattgccatcatccttaagtactacccatcgatttcctccttcgcctcatcatcatcatcatcatcaacttcacatccgtcttcaccaccatccttgacttgatgatttgccatcttttcctcgatactatcctccttgataccgtcgcatgcgatgtcgcttgatccttggcaggctgtgctctggggttccttgagaaatgcactaaggatagtcgtcttttcctcgagatagaaccaaccctcgtgaacaggcaacgtgcttccgtccatgtcgatatttgggggtggcatctttccatttgccctctcgtcccattccttgccagtctgttctttgaaaaattgcttgaatttgtccacggcaatctcaagcttaccccttggccccgcaagaagttcaacattggatatgccaacgcgactgaatttggcgtaggtcgagtaggtgtgtggttcggcagtagattcgaaaagctaggtaatctcaatacctttttcttggacgtattcacagaacatctcaaattacttacagtcaattggtatttttccctgctagtgactggtggttttgatgggcggaataaggtgatgctgtaaaccacacttgtctttctgtcctggtaaacctgacgcacggctgtgatgggtaaatattagacctgtatatgtcatctgagaatcgtgcttacgctttcttttgccctttgggtcgatgaaaggatcggctgtagatgacatatcagtaccgtccgcattatagcaataaatgaagcttcggaaaaccagtacctatccgacgtttcggaatctttgttttgatctccctcaccacctttggggatttagacttcggtgtgaccttgtttttctggggttccttattctcgggcttcatcagattcttcagaagatatggtccctcaggctttggccggcgtgtgtctgatagcaacgagtcttcaagccaatcatatgagacgattttgacggtaccgatattctgagcagtctccactgtatgttgttgattaacttaaggtctttgaacgatttaagtgtaatatacctggaactgcatggctcttgaatgcctcctttgttgcaatgagatgagtgactcgcgggttcacgtctctcgagaactgccctccatttgcccgaatccactgtgggatcttttcgccgatgccgtcttggaacttgccgactatagaggcatgaatcctttggaacgtcttccccattttgagttcacactgctgtctgagaattgactggatgagtctggtgtttccgtatcactggcagcggaatttccacttagaatggcctcaatatgagatatgtgatgctgtcaggaggggagactggaacaccgcaaggaccagttttataggcaagaggcttgcttcagttggtctttgctagctgtagcaatatgtcagaaatgaagtgtgtatattgctggaaagcaagtctttgagagataatgactgagagggctagtttgatgatgcccagcctcgtttgagctctgatgttgaccgcgatgtcgttcagaaagtgcgagaagaacctcagaaatgagatatttctattaccaggggacaagacttcgaggcaataatgtgatatactgcacagagctgtcaacttggtctgcttttgcaatgttgatatggaatgcactaagcatgatgatttctagagggtgaaagtgatgagaaagtataaaatgggatttcgaaggcaattaaagacgcagatctactccaagaaaggatcaaaattcattcctgttggatatccactatagccttgatcaaacaagtcaaattaaagtgatactagaaagaaagaaatcataagtttgattgctatggatattgttcattatcggatatgcaaccccggaatggaatgagataagaagtcattctaagtaatgtcatacacgttcctaactagttcattgccgaatgcttttggcagacttgacaaatgctcgaattttctccaaatcttgagcgccgtttgtctctacgcctgagctgacatccaatccgaccactttgtggcccgactggcccagctttttcaccgtgtcgaccacgttgtccgggtttagccctccagccaggattaccctcaatccatcgtcactatcgaggacctttttgaccccgccctcctcgagaagctcgccagagcctccggcaccagagtccagtaatggaagagtgtggtatgctctgcgagcaatgccaatgtcaccaggagcgaacttgcgaatgacaggaactggaatcaaactagaccattccaatggctcagacccatgcagttgcacaacatcgagatccaacttttgttgttgagaaatgacatatgacaacggctgattcatgaacacgcccacgagcaaagcacgagaagggtgacgcaagatattagtagagtgatcaaaccattccaacggtgtagcgttcgacgactgctgcaatgtattggccgaacgaggggtcgacttaaccacccgggaaatgccgagggccacatcatccgagacaagtcgtgagcgcccctgaaccatgataatgccaatcaaatctgcaccagcttggatagcagccagagctccttcttcagtccgagttccacatattttcaccaacggggaacttggtgtagcaccagcagattttcgattggagccgccgagaagctgtgccacaaaggcggaggtatcaggtgccctcataagagcctctccaacaagaatggccttaacaccttctttcttataagcctccacaacctggggccccgagattccactaagggcacacacaattgtgctctcaggcacttgatccattaggcgactggtagttccgagatcgacctcgaagcttgtcaggtcccggttgttgacaccgatgacttcagaccccaggtcaactgcaatcttcatctcttcgggggtgttgacttcgaccaggggctccatgccgagactgcgtgagtaatggtacagtctagtcaacagctcaatgtccagcatcttcacaatgagtagaactgtatcagctccagccaaacgcgcctccaggatttgatactcgtcaaaaacgaactcctttcggaggacagctggtcggttggtgagtccctccaggctctggcgaacagcccgcaggtcatctatggtgcccttgaaccactccggctctgtgaggacagaaatgacgctagcgccagctttggcgtactcccgcgcttgagcaggggcacatacatcagccgagatgatgccctttgagggtgatgcacgcttgatctctgccataagtgaaagaggatagtctgactgtctcaggcgctcagggaatgacagctgaggaggcgcaatgttcagatcatacgcggcttgaagagcctctggccgcagagccggaattttcttctgctcgtcaacagcaattttgcgatgagagtaaatcttatccaaaatggatagcttcttgtctactggtgcggcggcggctgctccctgcttgttatcccaggtcccagtggtgagctctaagaagtttcggaacatcttgcgcccgtattccgtcaaaatactctcagggtggaactgaacaccttccactgcgaactccttgtgcctaatacccataatgatgttcttgccactaccgtcccccagctcaactcgcgaggtcacctccaagcaatctgggatagtcgactgtgttccggcaagcgaatggtatcgagtgacctggagcgaggttggcaatccctggtagacacctttagagtcatgtttcaactccgatgtttttccgtgcagaatttcgccggtcacatccaccttaccaccaaacgaggtgatcatacattgttggcccatgcacacaccaaatatcggaatctttccgctgaaatattggattgcggcgttactaattcctgcatcggtctcggggtggcccgggccaggactgataaccagctgagtaggcttctttgcagccaagtcctcaacagtgacttcgtcattgcggtatactgtgacggtagcaccttcaagaaccaggtactggtagacattccaggtaaatgagtcgtagttgtcaatcaaaatcacgttggatgcgctggccaatttggccgctttggtggcatggtggggggagtggtcaaccaggtccgccatgaccacggattgttgtaggagatccgggggaaaggattgggagaatttgggaatcggtattctgcaagctccggatctcagacacctaaaaccgaatcaaatgtttgcgaattatccagttggacggaagtgagtcaaaaagaatgtcccggcttacttgccactcaccgcccggcaataagatcagatagggcacctgattgttgacccagtcgcggtgaataatattcttttgaagctccgtctcaattcaagagcttcccacgctcgccacctacctttttctttgctctctcgtcacctttcctggtgtcgcctcgtttcgctcttcctttctaccctatgatgatctaattgcccaacatggctcccgtcccggaggcctatttcccgtccctggacaagtgcttctccggggacgttcaactcttgtatgtccactctcatcatttgtcgttatagaggctaatatgctgatacaatgtaggtcatggaaaagagcttttctctacgccattgatcccgaaagtcatgctaatgatggaggcaatatcgatgtcttcttctcacactccgaatccattcgcctactctctgatggcctaaaaccgcccccctccccctccgcaaaatccaagtcggaattcgaatccaaaaccgcagcaatccatgttgagaccaatggccaaagttctttcgacctgaaggagatcaaggcggacacgctatggttaagcaagcaagccggaatcgacgagatttctgctcttcgcatcgctatcttagaatggcagaaccgcccggcagcgcgtctcaccatcggtttttccagcgaggaagcgaccagtctacagagtgcggctgggaccgagaatcttcgaggctctctagccggtcccagcttcgccaacctattgaaccaaacagccagaagcgacggtggtcaatcatttgaaaaagaggagaagaggcgcttgcgactccgcgaggtgtatctctccgaggaaacccatgtcgtaaaaacactccgcaagctgcttgctctgtccctacacgatggtatctcagccgactcgaccgccagtcatgatcgcaaacttgctttgcagaaggtagggaccacaattttccaggacaagtcgactggtgatggattggaccggtttcttcaagaatgcatcagctcgatacgccgtcggttaacgagtttggaaggagacggtggctggctcggtgccacagaaagcagtgaggaactagagaacatatggagaacaagtctcgtggaggagattgttcatatcgtgcaaatcatgtttcaccagcttcaagcatcggtggaatttccaagtgcagacctcctattgtcctggctccagctcatggctgattatagcttcctggagacaattcaagcggtaagccgccagtcgcctattttgagctctcggaatgttaacgttttcttatagccttgtcagcaacccgtggaagtgttgttgccccttcaagctttcgtgtcacttaccacattggcgtttttaaaacccgctcgcgccatctctttccttcagaatgaggaatacatgcaatcctcgctccagccttacttctgctgtaaggataaaatctctcaaatcaatgagattttccttactgcatgcggtgatttgaacaccgtgaatccggcagccttttcatggggcctgatcttgtataccatccaagagctggcagaagacagaagaaccagccgagagcgtcaattgagccatgctttggctgccgcctacgacgagcagacacagaatgaagcactagctcaagcatctgtgtcttcagattatgaacaattgcttgactgcgctaggactccgcaaagcacggcggaagatgctattcccattcttacatctgatttcctgaaagaatcggcattcaacaccgttatcgccctggctagtaagaccgggtcaatgtcagccgtcgatgatggcctgacaacccgatggattcggttatcacttctcgaccttatccgagtcgctattatgttcttggattactctcccgaaattgtggggtcagtcctggctatcttaaatgatgatgacaacgggctgtcaagagactcaaattccctaggtcctgccagcgatcctaagtctgtattcgccaaggatcagaatttgatggatggcatctttcgcattgcacggtcccgtttcccttatgaaacgtcaccatttttactgctctgtcgtgctctcgtcagtgggcactctttgaatgaagaaggtttgccggctattcttgaggaggtggaaactatggaatcctttacacagattgtcccacccactttccagggctatgccaccattcgagaagacgagaacgccgattttgtttccctgctccaacccctcccaatgttagaaacatcgatccagaaccgtgctttcgagagggaaccaagcaatgctgtaatcgtcagcggttcttccgaaattccacggctgaccgttggtcaagtcatttccgattcaaaacccgcggttatcatgtgggagcatcgatactcctgcttaagctttctaggaagctggcttgaagaatggagcgagaccggtgggcactcgtctgagtggactgatgacactgctgcggaaattattgctctcttggccgacttgatagccaactctaaatcacaaagctctggcgatgcaagcggcaaaagaattctagagatggctagtgatgggctgtccaaacagggtgacatcatttctgtgatcttcgatatctttgaacgcaatttgcagactatcggctcccgaggagacttgggcaagtctttggacgtaaccatggcatgtctgcgctttatcaaggcacttataaagattttacccagtcgagtatggcctttccttggtcgcagcagtctcatcgggtccgatggcaagggaggcatcatgacagcaatcgtttcagcaatggaagttccttccggcgagtatccgttcctcctcagttgtgttgaccttgtgggcgctgtcatcgatgatgcggcatctcgagcagtattgcgaaagagcccgggcagcgtgacaagcaaaccatctatcgcatctgattggagtgctggtattccatctcacgtcatgagaactattatgttgaactttattcgcacaatgctggagattttcaacagctgtggaaattggaggttcaacctaccagaacaacggctcaagatcaactcgatgcttgctacttcgttcgagcgtgttctgtactatgccttcggaatcaatgacagcccgaaactagagaccaaagtgaccggcgttttctctacatctgcggcgtacattctagatatgctgcgccctcggtcaaccgccgacctgcccttcaacccaattcttcggttgatcgccgagggtcttcagactcccccaacacttcatctcagatatcttatcctctttgaagatcaggtcaactctacactgcggctctgcatcaaacttgtacaggcagcccaactggcagaacaacctgcctcgcttctagaggaacaactattcaaagccagcccggtcttagtcaaactctacgcgctacatgatgcatacagattgccggttgtgtcgcttctcgagattttgatctcaagcgccgcttcaaatccggataatgaaccaccttcccttgttggccaccttggggcagagtcgtcctgtctgttccttgatgtactgtcacaactcgacaagccgatgtgtgacagacctctatttcttgcagtatggcagctgctatcgacatttgttagcaagcgtcagcagtggcttgcagttttcattctcacagggtcatcccctcggcagactctgaagaaggaacccacttctagtgggcttagcatgaggagcgtgcctttcctgaaactggcgcttgagaaattgtctcatattgatcaacaagagccgcaagtagccttagcgttgctcgagtttgtctctcgtgcccaagaaaattggccatgggccacttcccacctgagcaagcacccccagttcttcaacagcataattaaccacgtctcaaaattgaagatctcttctctgccagtgatggaccaaatctatgccacgcggattgcagctgttgtcgcggacctgtgcgcggtctatctgcactcggcaaaggaaatgggagaccgaagctttataaagaccttgattccattagtttcgtggtatgccaaggatgcagttgaagtttcggcttacaattcttcattgcacgccaacttgaaaaagaactttgagatgcgatacgcgggctgcaaaattgtggacttcaaaaggacaccgctcgaagttcgtcatctgggacgggattactactacgacatgagtatgggagacaaactgctgtcctacgactttgcctgggctggcaccaagaaccgtgggtttgccgaggagtttgagcgtgccaacatcaatctgtctcttgtcgaggcgcaggtggtaggttttcttcccttcgttgcatatgagtttctttactaacctcaaaaagagccttctccatagctggaagttcttcgctatcgagcattgtgccgatttcatgcccgataccgaagtccgaaagtctatggcactggtcgcgcaaagttgtttgaaggccaatattagcagtggccctcccgaggccatctttgagcgaatccaacaagcacgcgttgactttgcccaggcacttctccagcggcttgtcgaggtacatgctagaggcgccgaagtcttccagctgctcgagattacctggaacgcactgcgatcccgccatctgacatatgaagacgctttgatcaatgatgataccgattacttccggtccctactgaacgtgttgttcctttcccttcagtttcaccttgatggcccctcccggagtgcccccgaagctatcaataagagggctgaggtttcttcgggtctgactgtcatcgtggaagtcgtgaaaacaatagtggcccagggcttcaaatccctcactacttatctccatgatgcgcccgagaaatgcacgccaaaagatttcgccattatcaatgctattctacagacatgcttgcaagtgaagaacgctgatcgtctctatgagcacatcgtgtaccacattgaggaatacgacaccgctcgtcatgcgacgacgctcttctcctgggccgaccaattggccgttgccggcgaccctgtgtacgccgagctcagcatctcgattctggtcaaaatgtcaaccctgcccatgctcgcagagcaccttgctgttgatgctgtcttgatgaaactgtccacctgccgtcttacaaacattctctgccaaaagaaagcattcggaccctttgatcctgttccccgactgtatgccatctggactggtggcttccttcctctgtgtctgaatatgctctacagtgtgatgcgggccgcgccggaggtggcagcattcctgaaccagtttgaatctcgcctgacccgcgcgacagaggcattctccagccatacggccgtttcctcggttccgacatccaagtggattagcctcaacatggtctcggaagcctactcgcttgcgctgatttcgttcatcctggaccggttccgcgaggcgggtgccagtgctggagttgacgcacaggccatccaagatctcaaatgggatagggtgcaggtcaaggaagatattgaggaactgctcggtcgccgcgctgctctgcgtgcacgcattgtcgcgaccaatgaaaaggagctggaatggtcccgacagaagcctgtcgacccgacttctgagtcacagaaccgattagaggagaagcttgttagtgagctgaaggcaacagtgacgtgtttgagtggggaggattcatgaatatgttctttgtagcctttctgctatttgtctcttctttttttccatgtattctgggttggcggggtgtagtaaatgaattatttcttgcatgaagctcaagtttcaaacaattgcattatcccaatccttcattcctttggattctatttttggagtggactatcacatgcaggacaggacgcctaatttggggaaaccaagttggcttgatcctaattggtctcttgcttgcagatcttggcagatgagctaacggggtcacatccctcctccccggttctcatgcacatgatattacccgaaggtatagccgactcgattcggccaagctgcttagcggtaacatcaatagggttgggtttgaatttggaggatagccgtggagaaggggaatattatcggcggtgcttgatttggcgaaccgatctatataggcctaaaagcatacgttagcttcgtgtgtggagacctagcagtcttgtagagtggatgtttttcggttgatgaatgcaagaatagccagcctcatgtggctgagagcggcatgatccagtttgcccaatgggagtctttctttggtagtcctttgcgttctattctttctaaatatccttgggtagatggcggaaagggcggcgtataacctttgatagccagcaactggcattttcaatagtgcaggctatattggtgtaggatgtttccatgtacttttctacactcgttccttccacttttgctgctgtggcgacagtaagttacaactcaactatggaggtaggtgtgaaggggtatagttggttaactagcggccagagtcaaatacctgacttttgccttatgttaatgggatttagaaagaaccgcatggtttctattcactatgagcttagtacactagtcccatgactgatctattactcggtacagcgtgaaaaccgaggctcgggctagtcaggttccccgcaaatcctatatgtatagcataaccgataatgcggggagattaactgcgaatcatgcaggatttaacgttctactccttatttataagaccccctcgccgttatctttctccccatatatcgatagcattagcattaccaaaatgccgtataaatcccgctggacgattgacatcccagacatccatttagcctctcttctccttaaatccccaacggcgcctctttccaagacacacaagtgctatctcgaagctgcccgtccagaaacccactatctcgccacctatgatctccgtctctggagccagcggttcgccgccggactacgcaaatcaggacaccaacgaggagaccgcatcctcctcttctccggcaacgacctcttcttccccgtagtcttcctaggcgtgataatggccggaggaatcttcaccggcgcgaatccaagctacgtagcccgcgaactagcctaccaactccacgacagcggcgccacgtacctaatctgtgctagcagcagtctggaaacaggcatagaagctgccaaacaagccaatctcccccaaagccgcatcttcgcctatgacagctccatatacaacggtgtaacaaacccgcaaaagggctgcgcatactggagcgacctcctcgcctcggaagaagaaggccgcgctttcatatgggacgaacttaacacaccagctctgtcgtcccgcacactggcactcaactactctagcggcacaaccggccgccccaagggcgtcgagatctcgcacaagaactacgtcgccaatatgctccagtactgtcacacggcaagcctgcgtccggactaccaggcccgtcttgcgcgttcccgctggctatgcttcctgccgatgtaccacgcgatggcgcagaatatcttcatcgcggcggcgctgtaccgtgccacgccggtgtatatcatgtccaagtttgactttgtcaagatgttagagtatacgcagaaattcgggattacggatcttatcctcgtgccgccggttgttgttatgttagcgaaacatccggctgttaaagggtttgatttgagtagtgttgagttggttggaagtggtgctgcgccgttggggagggaggtttgtgaggaagttgagaggttgtggcctcccgggaagattaatattaaacaaggatggggaatgactgagtgagtttgttgttttgctagccgattcttagaaactaaactgatctgcttctgtatagggcgacttgctcggttacgggttggaacccttgcgagattagtacatcttcgtttgtcggtgagctcaatgccaattgtgaggcgaaaatcatgtcgcttgatggagccgaggtgaaagagcgaaactcgcgtggcgagttgtgggttcgcgctcccaatgtcatgaaaggctactggcgcaacgagaaggccactaaagagacgaagactgcggatggttggctccggacgggcgatattgcctttgtggatgacgatggcaaaattcatgttgtggatcgaatgaaggtgaggttttttgttttacaagaagaaagaagaaaaaaactaatacgaacaggaattaatcaaagtcaaaggcaaccaggtggcgcccgccgaattagaggctcttctacttgaacatccggcgatatcagacgtcgcggtgatcggtgttatcgtgtaagtctgactttttttatgggtctttttttttcttcgcttctgatcctgtttagcgagagcgatgagcgccctcgcgcatatgtggttcttaaaccgggccaatccgccacttcgaacgacatcgcgcatttcctggataacaaggtttccccgtttaagcggattaccggcggaatcgtatttctcgatgcgatacctaagaatccatcaggcaagattcttcgcatgaaactccgcgagcaggccaaggaggagctaaagagagtcgctgcgagactctagactttgtttatattacaatttatatatcctagcggtttaccttttttccagggatgaatccaatgagtaggtataagagatgcctcggcacaatatatagagtatgtgcaccattctaatttcgtgtgtccttcggtgattggcagggtacaacagccgagccagtcaggccaacccctatatggacagtgcacactgtcagaagatggggccaaagggtgagggaaagtagatgaatgattgttcgcatgggttcgcgtagcccactaaaatagccgagtagggcatctcgcggtgtgattcgatgtatgaaatggcttagcgcgggggacccatgcaggcgccagctgaaagccaaagacaaaggcgatctccaagaggcgtatggcggagtactccgtacatccaactccgtacatttgtcatgatcgacatgtttctctccgcgggcattaataggtcaaatatccaaggtttcagggtcctaagaagaagataggcatattccttcgtcgtgaacagaaaaaaatgttaaaccggtggcgttaagaaggtaagctgagtggagacagggctggctgggccttatttatccacattttggggtatacttgtcagtcacgatgttgtacggcaaagagatcctgttcgttctgtgttgcaatttggattttgactttgcgacctgtcgactaattctgatttgccacgttaaaaatatcggcactcggtctcggttttcttccgtcagatgtatggcagagaaaccctatcttgcagatactatatcccggtatgcttcagtggtgatcaccttcgatcattcccccactatagtctaaattgggtctacaactccataatactcaaactctagctctttatatatcacctaaaaagcccacccctgcactccatcccactagttccttcccactcgcctccccgccaactccgcgcatagtctcgactcgacactggtatctttgactcgctaaaatcttccaaactctggccatctagatttactttcccacacgggcagttaagttgagctgtttccccattccacaggggaggcagtttcaacatattcttcgcgagtggtggacgctatccaaccacccaacaccccgtcatgaatgctgtggaacaaggatacaactacctatcttgtgacctcctacattcgaccacaaagtggtttctaccagtgaccagcctggtcagcttttcacttctcactctcatcctcctccaccgatatatcaaatatcgtcgtatgagacaagcacacataatctctacctctggattcaaagaaaagaatcaagacgtctggcttcaatctactgccatggaaaaaggaaacatcctctcaccgggctcgcacccatcggcatgcgatatcctgcaacctttatcccgtacaagcctcctgccaagcagtggagccctcgctgcacgggcccgagagcagcaaagtggaagtgctgcatcttcgatggcttcctcgcctgactgcgaggtgcaaaaacacattgaatcaactcagcaaatgtgcgacgaggatgccgggggtgtgcgcacttggaaacgtcttgtcgttgagtatcgatagttggccgcctgtttccggggtttattcattccgtacatttgtcggacttgagcggtcttcttttcgattgtatctcagccggggattccgtgggactgttatctttttttttttcttgctcttttgttatgccttctttcttggtttcccctccctatcgttgtctttactattttacgaataatgagaagcgtgggcttggtttgttttgggcggcaaatgggttcattttgttaagcatgtttagcaatacatatacatttgaatatgccacgtattgtggttatgatacattagaagaaggttgaaatctgataattagccgcccttgtagctcgaggaacatcttcagaatgcttggcttgattgtataattgaattgtacatgatcaactagttatcaatcatcgccttgttcgatgtgatcggtcgcggatctggaatgtatcagcgacaagagattcagatatggattgcgttgtaagacatactatatgagggttttcaagagcagattgatcgcatcaagatgcgattcgagcttctgtcggtatcggctcaaggactcacatctgagatgccacatgatgcgtcgccattgtgttttgacttgaacaatcaatcgtcgagagtgcaagaaattgaatccatttccatcaggtgatcctaccgaaggcgtggtcactgttgctcggtacttttctgtggcgctttcgagatgttctaaggtttggaggcacgatcgtaccattaaccctaattgttgagatagatcggtggcgccagggtccgcagtattagagtttctggacaagatatccatagcagctctttgcaactgactcagggagcaattcaaggcgaacagaacatccccaagttcttgtagatcgcgtggtgcattctcttgacctgaggttgcggctgtaagtaaccggcaggtaatttggctgcagagtacaatatctccaattgagaaaccgaacgacattccgccgtcgaatgtgggaaaagaaacaagaaaatgacaaatgagtggaattgagaacagtaatagggatcgaaaaagggttggtgtagtataggtaattcaagtatcagatagggtcctctgggcctcgttaatgcgtagccctatgtcgtagatattccgcattcctgcagatgacaaagtttcagagacaggggctggactgagccagtgcatgtgtctgccccatactgtgtaccaatcaggatcatagagatctgtgcagatgcctatatatatctcctctgattagcacctcttatgtcaacgaatgaaagcgaggggattcaatttgtccatatagaactttgtttagctgtagccaactagtctttttgtatctaaagcggtataaataatgtagttgaacccaagccgatccacaattctgatccggatgatcccgagtcatcttgaaagcgtccaagtcccccgcatatatgtgtagtaaaacgtccccatgacctgtaaggcacgtacctatgaaggtatttagctctgagactctggtggtacctggtggttattcgtcattcattgggcacgcacggctgggcatctattccaaagggttcagctacacggtcaagtcattacctcccaaaatctcccatacaatccgtctctctcgctcttcacagctctgctttctactaaattgcctgctcttgctctgtatgatggctatcccgatcgagattaagaaatccgcgacagccgacgaacttatcgagttcggcaagacccaggcataggtcgtttcgcccgtgtcccttcaatcactaaattagcacagctgaagcatgatgggtgcactatcttgagtgaacgaaggaatatgatcaacactatcgatgcgccggacaatgccatggctatcatagtcgatatcagcgcgccaggcggcaaattcgttattggaaggcacgcaccgacgccgtggggcaacgacgtagtcgcggaaagagccacagagggcaagacgcacttggtaatctggccatggcagccggaatggcaattctatgcaatcggttcgaccaaaataagataccttgtaaagccctccaatgctacataacctagcataaaaggcccccgtcagcaagagaggtcctgtcagctgagattttgggtgatgagcccagtgaaagctctacaagatctgtcaatcgatcacttcatcgtcgcgtgatctaactcggccgtttgatattgcgaatagaacatgaaggaggcatatagtggagatattcggaggcgaccagtgcctcagacttgttagatgaatcgcttgtagctgtcaccacagaggcaatttcaccaaattgctagaatcgtcatcatctattggtctttaagtggggtgagccctcaaatcgaactgtgacgtttccttgacgcatgccgtcctgtgagaagcgaatggtagcgagcataaaatatatcaaattccaggtatccaaacagaggtcaaaatgtaggacctgccatagatggaagattcaagattcaaatctcagctgacacagccacgcagccacacaaggatcatccaatccttcaggcttctctcctctttcacgcatatgaacactcatcattatatgatcttccacaatgtacttcatccgtctcgctccaccgaccgcaagaaatcctttgattcgagccatatcgtcactcgcgcctgggagtattcttcaaggcacctattggaactaccgcattctcaaccacaaccacgttaagggggatagcacacatatctctgatgtcttcaaagccgaggtcattccacatgagaattatcataacacccccaaggctcccaaatggttcatttatcatataaagatataataactagacttaaaggctaacttggctgcatagggcttttgtcaaaggggctttacctgacaatgcaactgccatactgaatctggaacgcgaacgtcatgcttatcatcttcctggtgtctcttccagtcagtacttccggaagatgtacgacgtgatcgacgatagcactatcgccttagaatggctggataccactcttgcagagttgaaataccagcctaatgatatgggcactcattcacttgttgttgctgttctaagagcagcactgactagttgtgccgttctggaggactccaaatatgtgaatacaggtaaagtccctattcttgaccttggaacgttggaatagttagcatatactaactaccctagactataagcctgctaatattctgctttctggcatcggttctgactgtatcatcgccaaagtgggagacttggggctcagtaagcaaatactaatagacgaattacgatttcgctaatatcacacacttatagtggttccggttggccacctacgccacgcccagccatatgccatgcgagcccctgaagtctaccttggccaagcatgtgcagagccatcgcaggtcagggcagttgctgcgatgtttctttgctggatcaaaccgggtgtgttaggcatgtggggtagctatcatcctttcctgaacgaggcttggtctatagtaaagattaagcgactctttcccgagtgggacattccgacacctgatgaggtcgatgggcacttaattaaaacagtagtaaattgtgcccagtctatgactgaaaccgagccaaaactacaagaattcttaccttttgacgaggagacaaaaacgttggagatatcggaccagctgagagatcttcttcgtttcatgttggtacccgatccggttaaaatgccctccgcttcatctgtgctggcatcgagggagttgcaagcttttgagaatcttggcgcataatctaaccatgtggacttgtttggatagattacacccatagatgtatatactgtagtcaaattcaacccgatccacttgttaagttgttccccacctcgggagctgcgccaatgctgagtcatcacgaaagcgcgccagctctacggagtacatcgatgccacatcttcaacctacaacaacttacttttgtaattccaagccacagccatgaccgtaacgacattcccctctgagggatctccagatctcgcccttctcaatgttgctcgcctcttcaccagactcgagcataatctcctctctccggggacagaccggcgggcattccaacaatcagaatatcagcgtatgcgcgtgaacaaggtaataaataactccatccttctagaactttgcctccaaagcttcactttcaagagacaagtataaatctaaccaatgccacagaacgtcgaatacgcccgcttactcctcacccaactcgagcgctccctcccacaaatcaaacccctcgaccgcaaacacgaagcacaagccgagatcgcgcgcgacagacagcgcctgaaacgcatacagaccgtcctcgaggaagaagcagccaaagccgaagcgaagcaaggtgaagaagacgagactgacgacatcgacgacgaatggaaggagctattctccaagcccgtcaccgagaagaaaactgtctcgcgtaaagatcagcagataccgacaaggccatcagattcgcaacgagaagtgaacggagcgagccaaaccacgattacctcttccgcaacagcgactccagcaacaacaactccaacacccacaccctcatcaacaagcccaccagcacaagcatcagcaccagcacccccgaccctccgcaaccgctacacaactcaccccgcaccgccatcattcgaaaaagcagctacgactggaagggatacaaccaagctctctggaacagaatccgaactgagcacccacagactggaacaggaagatctgacaagctctctcctcgcgcttgcttcgcagctgaaagcctcctcgcataacttccaggcgacgctggaaggcgagaagtcggcgttggaccgcgcggtgtcgggcatcgaccgcacgagtaccacgatggaagcggcgggtaagaggatggggatgttgcgcaagatgacggagggcaaagggctgtgggggaggatgatgctgtatgcgtggattttcgggctatgggttgttgctattctgcttgtttatgttgggccgaagttgaggttttgaaactggcataattcagcgctgtcttcgtctctgtctatgacagtttgattctatctttatgcggataccctttttttttgctctgcatatatatctctgcaaataacactattgtcgatatctacttgggagactgatataacacgcatcgaggtatagaaatagtatggaattaagagtcagaaccttaagagtcaatccttgaactctgaaataacccaacgaccgactggcatgacacatgagaaggaaacattcaaatccgcggatcctggcatttccccgtgcccaatgcccggatggacgctcttggcttccaacggacgcgagaccaaggaaaatgatggggggagacgatatggttacatacataaacaagaactaggggagagatgatatgatatccagcattcaaatcagaaggatcacaaaaaaaaggtggaaaggaaataggaaagagaaaaagaagggaggggaatacttcttgttttctgtagtggatatcaggacaagagaaaacacaaaaaccggctagaggctgtgtagatggcagggaaaattagaacgtgagcaaatggagattaggaaaaggaaacgcaaaagagaatcaacgccgggatctcgaaacggggattttcgaccggttctgatcagccccggttaataaaaacatgcgatctaggttcgacatacttcaccaaacgatagttcattagatcaaaccgcatagacggagattctcttggatgatgatatctgtgaaacgttagacaagtgttgcgcactaggttgggatggctgagcttaccgttcactgctgccatgacgaatcgaatctgggtagtgtcagttgcgcaggtgaagtgcgtgtagatctgcttttgctcggcctggttcagggagacgaaacggttgaggatatagtcgcaagccgcggcgtagtcggcaccaccctcgtaatcagggaagtagttcttcatcgggctaacggggagcttttccttgaaacgatcgatcttgttgaggaacagaatgatcgaggtcttgacgaaccaccgggaattgcagatcgagtcgaacaaggtcagggcttcttgcatacggttgacggtctcgtcttcgaagagcagctggtcgtactcggagatggcgacgaggaacagaatggtggtgacgttctcgaagcagtgaatccacttcttgcgctcggatcgctgaccaccaacgtcgaacatgcggtatgtaaggtcaccgataatgaaagtggtctcggtgataccggtggtcttgacacgggaacggaggacatcctggtcggtggggaggtaatcgggctgggcaatgcgctcaatggaatcgaagtagctaaaggaaacgaattagccacgtcgcaatgcgacagacgagcggtcactactcactatttggcagagtcgttcagctggtattcgcgcgagcgcttgaagcactcctgaacaccagtgtcgcgccaaagttgtccaatggcgtttccaacctcggggggaatgctgtcaccctctatctgagcgggctgcatgaagatggtctgcacgtggtactcgtggcgcgcatcctccaggggcaactcgagggattccatggcctcgagaatgacgcgcatcgactggacggtattgctgtagatgatttccttgaatgattcacgctcgtcgcgagagtatccaccctcgtggatcagcttcatctgcttgagaatggtggacttgcccgactctccggctcctgtatacccagtcagccatctgtacatattcccatcggaactcaatggatcataccgagcaacagcatcttgatctcgtttctttgcatcatcttgtcgcgcttgagctggttctcaatctcctcattccgcgccttcccctccttatcttcggtgctcattccgcaacccattttgacggtatgaagtcgcaattaacggtgtgaaagtggatagagggttcttcgtggagggatattcgatggtttgttacagggactgtacaaggcgaatcactgtcagcaagctggaataatttcttccggaaatatcgcattgacgggctcgaggaggcgttgcataggtagcacaagcaccgctgagcagaggcagacggcgtttcagagttggtgtaagcgtgccgatgcaaggagtcgccaccgagtttccagagcaaatagccaattgacaggatcaaagggggaaaaaaaagggtacccacctgaaggttcttttgcgatttgcaaaaacgaaggacaaatcggcaacagggtataaaggaaagaaatgaaaagaaacgagccagaagaattcaaatagaatccaatctggaaaagaagaagagagagagaagagatacaagttgttcaaaggtaaggggcaagacggcaagactgaggggggaaattgggaaagtttcagcagagaaaggggatacgctggtaataccacggcagttaagcagcgcatgggtgactggggcggttatcggaggaaatagtatggtgttttccgtacacagattaccgattacaaaacaataccaccccggcaactgcagtgagctgattgggcggtgtggggacctgactggcccattcagccccttttgcttttttggctggtgatatcccacgggcattgcatcagagattctattttcagaggatgtcgatgtatatggatgcatctatggaacattctgtttcagacagtcagcccttcataccaatgctccataatagagcactgtacccgggtactttgtatatataaaaatgccggtggactcctggaggcgtgcagatcttgtggagagcaaaactagcatatcaaattacaatgctagcaacaacaggaaacttagaattctggctcgtcagggagtctggggagcgaacccctgaagaatactttatgtacatttagtagatcatacaatttgctccccacacggtgcataaaccccgaagtctgacctcatctcagttctcagtttcagtctgaggaaacaaagaaacaaagcaagactcctgcccaatcagactagtctgcgcctcatcccatgcatccatgtgcagttctttgatacttccttgaaacttctgaggtacaataatacggacaacccaataggtacaacatacatagtaccatgccgagatagactgtcataccttcaacattactgctcagcccctcgactgatgaatccaacaatcctacgtcagcatgattgaaaaggaggtgtcagtgagcccagggaaatccccgaatcggttcgatagtgaaactgaagggatttcctcgttccaatggcgccctaaggttgtctccttaagttctgcagacgacccactggtgcccctagccgttttcgccgctaatttgcgtgaggagtttcaaagttgatactagactccacttggcgcctcgtggcaatggagactattgaacttcgcggtttagcttggtgtctaaacatgacctaaactggcgaaatgccgaagtcacgggatgtgctgataatacactatattacttagatacagcctcatacaagaataaattacagatcaccctccatgcatgcatgttgtagatcagttccaatggctgcctgcttcatatcaggtgacgtacatttataatggaataaaaaacccagcgctactcacaacctcaattccttcaacccctttacaaagtctacctttcgaaggactccaaccaggacactcaagagtgtactttgactcatcttttctatattctccggacgctcgcgcagcatccaacttgctagtgcgtgacgatgggtgatgccctgcggccaaatgatgatgatttcagcgaagtcctccagcagagtctcaagatatggacttcctatctaggtactggtgacaaacagagccctatcccccgacaagccatagatatgagacctctcgtcagtcagaccccgtctttcctcggtgatggccttcctttgaacgagaatatctcgttcgcttgcgaagaaaacaaatcccatgatagactttacatcaacggcagatcaacgtggaggacttctcaagggacctgtgacctaccaccaaaggtttttccaaagcaatttctattagcagttgaccgtcgattaagtgtggaattatccagaagattctcctctttcagactggcatagagttcaagggctctcgggctatgatgagggaaactacctatctgttctttactttgcatgggcttacatcctatctgctcgatgggttgagttgcttaatcgctctgctgaccacgaatgtcacatgggctacattgcggatcgggtagagggtcgattgccacagccaaacaatcaatctctggttcaaattgacatcggccacgatgcttccgtggaagaagtccgctggtggcaggctattttgggctctgacgataggtgggacgcgaccgtgaagtataatggccacatctatttgtcgtatggtcgatttcggcaaagaaggtggaattcaacttggccactaaggatgttttgagcgcaatttcagaaccaccatcgtcggaaaccgctctcaactatctctcacgtttctgtgtgcaccatcgcctctacgcccagtgctcggtcgcccttgctggggtactcttcattccattcctggggaagggaacactctcacttcctcttccaaggcaagcttctcagtcggaactaacacatcgtattaatggctcgcctgtttctattccggatcttctagctgagcacaccgaattacttcctaggtatatgacgttgagctccagcccgcaggctttgcgttctattctatgcagcacctttttcaatccagatattgagtgcaatctcgtcagcgcctggctgaacccggctcttgcgattctcaattccatctcacctaatgagttgggccctttttttggcaaatcgaaagcctctactcggacctctctggcttggtgcaattctcacaggtctggcaaatattattttacgtgacgtacggacgggaatggtagctttcgatcttacagcatcggcctgggcaaatacagcaaatacattcttgacctctagaatggggactagtgatggtgaatcaatacgccgcgatgacgaatgccggctgtcattcattactgcctgcgaaggccatgaccgacctccaatctggccttggaagccttttgggagcacaccaatttgcgacacagatctgagcgtccgacagcattttcaatgtgctcattgcctagaatacgagtcttgggaatggatgttgacaaatgacgattcaattcgggattttagaaaggataacaacgaattccctgatcaaacaccacactccgcccccagtatgacaccggcagcactcagcgattataaatatgatttctcttcgcaaatgcactcggaaggagtaacccgtgggatatttggatggttgagacgaactggttatcctcttagcgaaaaacccatataccaacattcatgggtcgatttggaaagcagtgacgaagaagaagagcccgatgatgccaaatctgacgtggaaaagcaccggagcgcaaagaaaaagcacgttgacacatggcttgacggaatcgaatagcgcttatgaatcgggtgaggccgtgatatcattgtaccaaaagagcagtctggtcccgctagctggatgatcgagacataaaaacacggtacatggccctgtattgccgtggtcagcggtttgactgatcttccaccttttcagactgccttgcacgtgtgactgttgtgcttatcattctaatgtccgcatcttaggtctctgtaaacagcccgaactggcggtcactatgatccttactcgcggacatgctctaatgccgaccaagagcctagtcgttctacaccactgcagaccaattgaaggggaaaagaaaaaaaaaaggccgaggatgatgattggacggcttaaccaccttgccccgctatgtactttccaaggcgagaatccaccgcttgcataatgcagtagatgggctcgaatacttagcccttgattgaagggattgacaattgacatgcaagaaatggaaaatggctcacggtttcagcaagacagattggcagagaagtccatatgctcaggtgtatgcatagtgactgactggatagactggatacaacctcgcacaagaataaattacctgcagttctagagccaatattacaaattgcgtagatcattccaaggatcgatctacacctatctaagccacaagacgtagatttatggctaatcggttgtaatatactcatacatatctacaacatacatattctcttctacataatatcccagctatataataaccacaatgtgaatcccatcggcgatcgttctaccgatcgaaaccaataaaccttggtacccaacgagagttcctcgatcgatgtggtttctcggtttctccactttaaaaaaggtacccttccccttccccaggctcccttcttatcaccacaatcatgtcgcacgaaatgtcccaattgggccctcggggtaatacgccaatccctcttgaaatgaacgacaagcactaacagtcccagccttcaaccacgcgagcagcagcgacgccgaggcggagtacgaccggctccgcgacctcgcgcgccaggaagcctccaagcgcggcgaatgtttcagtcgggtacgcaagcacccaatcccaattgcagttgtagttgtagtcattcgatcaccgctaacacccacccaccagtcgaaggaagcctactcgagcggcgatggcgccggcgccaagcaactctccgaggagggcaaggcccacggccgcaagatggaggagtacaacaaacaagcgtccgagttcatcttccgcgagaacaacgccaacgggcgcgtcgaggccgacaccatcgatctgcacggccagttcgctgaggaggccgaggagatcctggaagagcggatcaagtatgccaagtcgcatggacagacccatcttcatgtgtaagtgtcggaaacgagcccctaggaatttcttatcgtgtgcgctagacgcgacgcaacgtactgcgactaattccgcttcgcgatatagtatcgtcggcaaggggaaccactccgcgaaccatattcagaaaattaagccgcgcgtcgagcaggtgtatcgggagctggggctgcagtataccaccgaggacaacgatggtcgcatctatgtcaacctgactggtggtgaggctgttatgcctccttcgactggttaccagggtggggctggatacccgggtcaacaacagggacaccagcaacaccagcagcagcagcatggacaaggacaccagcagcaacaacagcagcaacagccggacgaactcgaggagctggccaagaaattcgtgcccaggattctgcggaagctcgagaaggcttgctgtgtggttatgtgagcttgtggttcggtgtttgggacatatacatagatgcatagctgtgtttgtggacagatgtttgttgttttgcctgtgacattttgcgctgtcggtttctcgtttctagatcatctaccatctacataagtatacttcaagtctaggttcagccgacgactcatgatggcagggatgtgattatacccctacttcatatggacatggacattgccatttactttcatgctgttgaggacagctaattgaacaatttacactcccaaatccatatcataaatcatatcatcgtgaactctcatagctacatagcaaattgtgaaaacaagataactgaaacggggtatatccaacaaatacacgacttccacaaaatcatagtaaagaacaaagaaccaactagcgcgcattgggatccgacagcgtcgactccacgatcttttccacaatagcacgcaccatctgcccatcaccagctccgttgatcttcggcgtagcatcgatcgtctcaatcaacgccaatgcctgatctcgcaaatccccgacaacccgactggtgtgcgcaaagctgcccgtattcttcatatactgcaccgcatagcgcttgacctccacatccttggtattttgcttgaggatattaatcagctggcgattagacgggtccgagcgaatgctgtgaattatcgggaaggagaattttccctcggtgagatcctcgcagaaccctttattctccgtgtacacagtactcgaaaggttgaggtaatcatcgcagatctggaatatcagacccatgacattcaccaaggcaacgcagtctttccccgtcgtactctccgcctgcatcagtttcaccgcgagccgaaagagcccgcccgttttattgccgaccatttccaggtactcgtcttccgtcgggcaggtcagcgtgtcgcgccaaaacagatccatcccttggccccggtgcaggttcagcatctcttgtacgtagatgtcgattgcggccgggttgttgagctgctgaacttcttgcagcgcgaggaagtacacgtaatttgcggagttgattgtttgcgctgttccgaagatgttgtgcgcgacggggatgccgcggcggaggacggagttgtcttcgacgtcatcgattctggcgtcacgccgtcagcatcggatatggatcgggtgtgaagagggaggcggtgtggggtggactcacaatagtgatgatgtatgcagcatcgttacgaccttggtgatgatcgccaggctcgccggcgggacctgcagccaagcgttgaaggcgtggatcagttggcgccgaatatcttttcctgggtgttcgtgtacatagtcgtatggacccatgagaatcttgtcgttcttcgatgaccatgttccatccttgtacttggtaccgtcgacgctggacttgttgcgacgatgtccggtttttggaggctcttcgtctgtcaccgacagtttgtgtcggtgcgaggggctgtcggtgccatttgttgcattggtcgagctttcccgaggaggaacgggactcgatggttggaaggatgttgaattcatgattgcggatgggggatggaggggttcggtaggcggcagaaattagctagggacctccggggctagaagtttggttcatgtatagatgacatcaacacctctttttcatgtttgtatagctacatatgtagaatgatactatgataactatatcgtgaaacgtatcatgcaagatgtattctgcgtacatactttgtacctagtcgtagatggtatgatcggatgccgaggttgactaatcgggcggcggggctgagccacttgagccaacagtcaccagccaccttccaccagccacctgtcacctgccaccaaccaccagccaccgaatataaggttgacaaatgaaatacatcaatttgattggcaacgcagccctggataaactataatgatttgataggtcataagcagggacaacccaaatgtattcaataatccatagaaaatatcatgttcgctacagcaacggagcaagggaaacacggtgtgaacacggtgtgaatatacggtgtatacagtgtacacgatttaagcactccatacttactccatacttactccatactataattaaagtcgaatctgattgacgccaggggtggatctggaagaaagcgagttaagagtgtcccgatgcgtcgagttccctggtttattggcgcgttgccgggggcaacggcgctttatttactgcgaaccttggaaagccgcgaagggccccgactgacctcatccactcccaactgggacaacacgaaccttctccactttcttttttggatcttttgtttaagaatgttcctttgcttttcatttcggtagaatagctcacttttctatctcacatctgatttatcaatggaggctctattagcccattcgttcgattacctctcctcttatgagcctagcaagatccgtaaaggattacgccaggtcgaaggactcctcgcacagatatgtttatcaaaacctaagcccgtcttggaccggagatcgcgctcccccgatatccagcccgtcccaaagacgttgcccgagttgcgagacgatccggcctttcgggaattttccaaattgcaggaaagctttcaatggaatagtatgtctttgaaatttctatcgcaactagggcttgggtactaacaaaaatgcttcagtcgccatgcgcctagtatcctgtcttgaacaccttctcggccgagggagtaacgggacaaacgacatgctcattgtctgcacactggatttaatccaaggtgccctcctcctccaccgcggctcgcgctccctcttcgcccgcgaaatttacatgaacctcctccttgaccttctcgaccccatcaactgtccagcagtgcaatcagcaaccctactaacactcgtcaccgccctactggactgcccatcaaacacacgcacattcgagggcctcgatggcctcctcaccgtcacatcacttttcaaacaacgcgccacctcccgcgaagtcaagctcaagcttgtcgagttcctctacttttatctgatgcccgaggccttgacctcagcaccgatgtctccacaaggtctgcagcgcagccccagcaaacgcacctcagcgcgtagtccgcgctctgctgcggcagcagcgagtaaagtgagtcgtgatatacgtaccacggacgaaaagcagaatcttctagggaggtatctcaataacgtggaggacctcgtggaggatttgaaggagacggctccgttcggagcgacggtttactgaatgacctgactggcgatgattgactcactgcttgacgaccaatatgcgcgatgtccgctgcgatgacttggtgttcccttcctttttctctctctccatctcttttctctttactctttttccatcttcccttctccttatctttcgcccctcttcacgggcgtttacctcatgttccgtccggtacggcaattatgcgatcttctagactgatgcctcgtccccttttggcctgtcttttttgcctatttattcttcgcttcaatcctggaactttgtcgacctctactgtgcgctctcccggcttcgtttcctcgtcgtttcccttatgtctctttaatggcgacatgcatgtgtatgattattctccgtgattaagctgaactgtcaatatagtcctgatgaccaccaatatttcttcgtaattctacttctcaatgtaggcttcaacttgtaacctcggtttcgggctatctccggttatctttcctatctttctatctccattatagcctggatttatttcatataaatgagtcatcatatatgagtcaatgtagcacggactttaataaccaactatatagttatatacttcaagttcgacgttcgaagtggatcaagtccagtattaccgtggatcgcaagttcgatatatccccgctaacccaccgagatcgagaatcgttccacggtacaccttagccttcaaaatggagacaatccaggagttgctagcggcaaagccgtgcggaaacccaaagcagacgcagtacgtcgacacggtcgaagcatacgataaatgggcagaggtgtgtatatatatcctctttgccataatatatatacagcattcatataaccatttaaactgtatccactatctatcaaaataccaaaactaatacaaaacaggtctacgacacagacggcaacttcctccaacgcctcgacacaatcgagatgcgctccctactaccccaattcatcgaccgggtaagcaagcgcttccagccaacagataccgagaccgaaacaacccgccctagcctagtagatctaggctgcggcaccggccgcaacacaatccagctcctgaccgcgcttagcacagccaataaagccacctccttctcggtaatcggactggatgcctcgcgcgggatgctagacgtagcgcggacggcgacaggccagtatgcggcggaaaatgcagcacagacgcacgttgagcttgggatccttgaccttcttcagcctgaggtatcgaggacacagcttccggcttcgttgtatgcacccggtgctgtgggggtcatatctacgctggtgctggagcatattccgcttgggcggttttttgcggctgcggcggggattatgaggtccggggcgtatttgcttgtgacgaatatgcatgcggagatggggatgcggagtcaggccgggtttacggatgagaggggggtgaaggtccggcctacgagttattgtcatgctattcctgatgttttggatgcagctagggaggctgggtttgaggttgtggaggttgttggagcgggtgcggatggggtggttgttaggggggttgatgatcaattgacggatgctctgggggcgagggcgaagaagtgggttggggtgagggtttggtttggggtttgttttgttaagacgggatgagatggaaagtagatcaacggagatatcattttatctagataatgacttcgaatccaacgccatgagttgctgttatacacttagaagaatttcagtagtctgtcgcggtgttgtacaaggttgggatgctctttgagcagttgtgctagccggttccgtttccagcctagggtatcatccaagatcagctgcgtgtaggcaaagacgctggcatcaaagaggcccgggtttggccggccgaagaagtgctcatccttgccgagcaaggtggatagcgcctcaaatgcgccacccgcatcgccttccagggcagcggcgtcgatgtagcgcgatgtcttgaggagctcatcgcgggcggcctgttgtagctggtggcctagggctgcgcgcacgatcgagtttgaggttgttggatttacgtagagtcggcgtgcgacggcgttgaagttctcactgtctaggtaaagcatgtataactagacacgtcgttagctccgagtctagggttcgtttcatatggaattatcggcctacccaagcgctgcgtatccggttgtccaaaagcgaggcataaacctcgaaccgcaggttcaattgctgttcctcctcgcagtggacttgttcaatggcccatttttggatcttgtgtgaagggatcgggtttgaggcgtccgcaggcagcgaggggaggaggaaaggtagggagccattcggcgacgcatgattgttggacgaggtgatctcaaagtcaattccaacgaatttcaagtatgcctagtgcgagaccgatcagtgtggttccgacagggacagctacacgcacccttgcatgcgagtatagacggcacgaacctgccatttgagacattgaggattgaatgaaggccggccatgttgtacaccagatgcgtcggcgaaaacgtatagctggttgatattctcgtgtcgcggtcgaaggcgttgaggaatctcgttggccggataggtaatcaacgggaacttgtcgaagaggcgcctgataggagcagggactgtaaagaatggactggcattggactcttctggagggctatcggggcctttgggcggcattgtggtggtctgaaatccaaagtcgccaaagtccaagtccgaaagtccaaaagtgtccaagtgccgtcatcgaaacaattccgacgcgccaaacccgaacaggaaggtattgccttacctaatgatggccaggtaccgtcctccccgcaccttttctgacttttttttcgtttgtacttgggaaaagccggaacttacgatctataacctattcggatcatatagattcgatatcctagtgcttattctattactcgtggtgttggtgcgatcacatcagccccggtctctcccgcttcaccgttgaagaaaccaaacctccacttcgctccgtctagactccaccttttattctgatctgctcacgcgaacaactttgacaataccggcatacatatggcttagttcgtcaccaaatacgaggcgtctgacggtcctagcggaaacgggcgattgtatgcgcggggtatcgactagcggttggggttctgcgacacacggttgcgacattacgaatcaatcttgcgtctcaccttaattcgacggaatcatacatattccttcgccaacatgcctctcgacgaagaaggtgccaagtggtcctggtaggaatatctcgtacattgtcaatgaaaccgggctaaaccgttactccagtgaaccatgcattcgaggtcaccgatcgtcaaaatgccagcacttcgatagactcatgatgaaggtccctaaagctggccgacctcttgcaaaatgcccccacccgaagggaacctgcagctgccagaagtcatatgccgtgatggtccgcattccgaaaggtaaggatatatttgtcaacccactacacatgtgtttgcgtcgtactgacttgcctaggctcatcatgtctatgtcgtccgctatataaagttcctatggataccaacgagtcaacccagtctcccccaccatctatggtttccacttcgtcacctgcgccgggcaaggtccagaagtctggaagaagacaaagtactatgcaagcagcacctgaaaacatagctcgggcgttacaaaatatgccagacaaggttaagctcgaggatggaacatcgaacttgacttcagacttctcttcacaggtcgggttagatggtgcacacatatcttctactacacaaaaccgaagtacgccaacgcccacagaaacttccaggcaagactcgcagtctccccaagtatcaagctgctgctctcaaaaacaaaagccaaaggcaccaaccccgaccccagctcctactgcggctgctgctcctgctcagaatggtggatcttgctgtggagggtctcgccctcctacgacaaatcaagctgtctacccagaggccgaccaatcgcaatttcagccgcctattgcttgggacgatcagagttatatgcaattcccaatgcctcaaatgtcgccctggcagaattcctcgatacccacgcacgaagactacatgcattccgccatgcatcaagtacatccccaacacccaagcctccataatgggtacatgggaatggtgctgccacactctcagccccaaattccccagatagggatgtcactcggtgtgactgcaccgccgtccatggcgtactccaacgagatgaacggtcttggaattacgcaagcctctatgagtccatacatgctcaacaacctcgagccttcctacaacgccccaccaggcggcgactcttgtcatgactgtagctgtggagaagattgtcagtgtcttggctgcgctgctcatccattcaataccacaacacgaaaacatgtccaagagatgggtgccatgatcacctccaacggagatgacaagaacccagaagtcatcaacccttaccaaacctcaccttaccagggaggcaccccttcgacctcgttcccttacttcattcaaagcaccccttcaatggaccatggcttccagccgattccatttgatagctactcagacccaaactctaccttagccagcggttactcctcccctctatccgcaaaccaccatctaaaccagcagttaatgcatccttcggagtattacaccctggaatacccagtcggcctaccaagcgcctgttctgacatgacggggagctgccaatgcggtagcgactgtagctgtgtcggctgtctcacacacagcggccacaacggtctttccctggatatccctatccccgagcaccccattcccgacacagaggacaagcaaactcaacactcgcgccatgtttcccgcacaagttccgctacgtctcgatcttcgcggatcccgatattagacaatgtgtctgtgccctgccttagtccgcgcactttggagacttctaggatctagatgatctacgtcttgatgattattaccattttctttctctactcattttttcccctgcgccgtttttgatcttacatgatttatgatctctcatgataccctatctagaatctctgctctagacggccacaataatagattgactgtttgaatgtttgttgagtagaattcataccactatttctgctattgtcttttttcttgccttctgtaatgttttttttttcatccgtagaaccagacagggcatgtattggcgtataaactagagacaccccgctaccccgggaccacttttccttaccctaataagccctacagactgggacatagtatattttgctaatatcttctaatatcctatttgaaaacaatatgatgagcatcaatgcattgggggatatcataattcttaagcaaaaggtaatatacagattaaagacagttactcacaaaaccccagtcaacccttattccactttccgaacttcacatagtcatcatagagcgacttgaacactgcacggccagagacatccaacgcagcgttaagcgcacgcatagactcacgcgacatgacatccagagccgcataaagaccaggcaagatagcggccttgacatctggagacagcgacccacgcagcgagcactgcgcatactccataacaacatactgcaagtactggccggcaatacgcttcgccttcttcgtctgatcagtcagggcctcgcgggatgcgccaggctggggacggaggacggccgagacggtagggtcgcacagcgaggtcaacagacgggtgtaataggtagcgtgcgaagcgtcgagcggggcgagccagaagggctgtgagagggtgggctggaagcgggagcggccgcgtttgcgggaccgcgcgaagagacagcctagtaggcgctgcatggcgtttactactaggtggaagcggccgccgatcttgaggcgttgcaggctgagtacgacgcccattagtcggcacaggcgggtgtagatggttggtgcgtaggctggggagatcttggggccgattttggaggaggcgctggcgattgcgctgagaatgctgtcgatgttgcattgggtgagactgcgggtgtggctgcggagaaggaggtccaggcattccgatgcgaagcagaattggtcgatgcttgtgctttggatgatggtttcggcgagggatgtgcagaggagggagatctcgcgtgatgtggcgctctctttgtcttcgacgggagagagcgaggaaacggcgaggtagagcacgagtagtctgtagctggcgttttcgccaatcaagccaagtccgcgaacttcgcagatcgtctgggtgattttttctacgggcattgagcggaagcgttcagtggtggtccggataaagagttgctggtcctcggcatagagagactgaagagcaagcgtctcggcgcattgtaagactggctgagcgatgttctcttcgggtcccttgcaggcaagaagacgtcgtcggatcaaccgagagggttccgagtcaacggtcaattccatgtaattgtcgatcttggaaagaaacttctccacttcgacgttgttggtggctagatcttcgaaatcctctagagcatcgatggtcttgataatagtaattgtttcctccaacttctgcttcctgcactggtctttgacatgtttcatgtcagccaacacaaagtcaaacactttttggcgacaagcggcaagttccttctccgagaaggctgtctgcagctgctcgcgatgaacccagagctctgacaaggtcaacctcagaaggtaacaggccatggaatcacgatccacctgctccattttagctgtttgcttcgatgcccgggcgaagagcttcttgaacatcttgttccggtcattctcagatgaaaccaggagctttgccgatatcgcgtggtgcaggcttcggaatgctttcatgatctggaggtcgaggtcggtaccctctaatggtacggctcgagcagcagtccagatgggctcccagtcactggtcagtgtggcatcacacttaggcatggcagccaatttcgccatcatcgtaattattccaattgtgacttccggagaactgtcctgttcaagtagaacattttgcaacttattcaagatggtggttctcagtccccgggtgatcaacggggctggaaccctctgcaagctcttgacaagcagtttacgattgagcggatcttgctcgatgctctcgttgagaagaagggaaagatcagagacaatgaagggagcgttgagcatgtattcatgacagaccacactcgcccatgcctgaaggaaccttgcttcttccgaaacagcctccaagggaaacgacgacgaatggtattgagcagctgccagggacaggatatgacggaatagacgggatcgatcctcagaagatataagagcccagacttctggaactctgacaagggctaggaaataagctagaccaagggttgtttgggaattcacagtctctgtgcggccattccatggcgccttcatcgacttcttggcatccttggttgagatggaggtgatgaggtctatgacatccttggtggctttgacgaatgagcctagctgctcatccctggcgtgtgccttggttgcagcaatcaggaaccggtaagcctcccacgattccagaggagcgagttgagctttggttaggtccttgtggttgcggtgcacagtcttagcggcgacttctaccaacggcataattgtacctgccatggtattatcggctgactgcagggtgttctccaggaaattccgaaccaaccgccacagacgccatcgccagtgcagagcctgcttcgacgacagagtagagcttatggtttctaggagagattctaatgtcttttccgattccgggaacgtcgagactcggccacggaaacttgcctcgacaagaacaaacttagcataagactgaggggtgtcagcgactttgccattttcagctcgcgtctcgctagcagcggtgcgcatctgggcagcaacatgcgtctcagtgagcgaagtccgcatcagctccgagtaagcatccgccaactcatcatcttcccaaaccgagaataaactcagattgctgttatcttggcgagcctcatccacaataaggatttgattgtgccacaattccatgaagctgggcaggtctcttgcggcagcgaaacctcgtaacaacggcagcacaaccttgctcttgattatgtcgtagtccctccgtttccgggaaccactctcgcgccattgtaacaggaccttgtcgagcaatgcgtcaagaagcttacgcgaatcacgtaaaccggagtttggcaggaaaatatcaaccccaagactgataaacagagccgtcacattccactggaccttctcaagaccttgttcgaaaagacctgtgtaattggcatgcgccagaatggtgtgaagagaaagaccgacctttcggtcgagagcgacctggaggaggtgctccaataccgagatgaacttggaagagaaggtagcgaagtcttcctcctttgctgtagaaaacgctagctctgcaacagcgacgaataaagtctccaaccacggcgcttcatgtgtctgcctccggaacacatctctaggaacagcacgcacggcgttgtcaaaaagctcaggaagaagttccactgatcgccaaggatgcatacaagcttcattggttgctttgttttccttggctacggcaaactcgcgaatgatcggcctgaaagtatcagttactggtttgaccgagctccagtcgggctcatcttgagaataatcgattccagagcctccacgctcaaagaatgctgcacgagcgggaagtaagacatgcagggcaataatgcgttcaaccgcatgtagcagattggctcgctcgtcggtgtcgagtttggcggaccgcaggcaaatctggagcctgagcgcgtgggcgaagcaatgtctcgcgaagaattcattactggacttgttgtccatatcatcttcacggtaagaccttgattcccacagctccaccaccgagggaaacacgtatagcaagtgctgaagatcggttgttttcccctcatgcgagaactgcttggcggccacggcggctacccggaatgctcgacccagcagcatggcgacggcctcgggctcgcctctcagcgcaagcttcaaatgagagtttgccacgccatcagtgcctagtgtgcgctgtgcaagtgtcacaaatccgtggagacaatccaaggcgcggatgaaggcaaggaagcatgctgcggggttctgacgctgctcgtccacgtccacgtccatggcgtctgcatcattctcagttgtcattctcttgcgttttttcccttggcttcctcggcgatcatcgcgtgtcggggatgcagacagtgtgtgactagactcggagtcagagctaagggttgctcccagaccagaaaatatatcggcctccaaatcttcgagtgtatcgcatagaatcgataaaaatttctgatctctaagaatagcagcgatattcttcggcgaaatcaggttgatgagctgtcgtaatagaaggaacgaagccgcgtccactctatagtttttcccacttctcaacctctttaatagccatcgcagaacccattcctccttcggggtagcgtttgtttgaattcgaacatctcgatgaacttccgggtgactttcacatagtgtcaaatccacaccgatgatctgtgccgcttcgtgaatctgagtcgttggactggcggtgcccttctcaaggcggaggagcgcctcttgcgatgagcgcggacgctgtgggtgcgcaacacattagatcccggagaaagacgtgtatcattcgaaggtcacatttgacttacctccgcaatcaacggcatctcgaaaaaagcaaattattcgagagagtgggtatttatttgtcgaggaagagaaaaaaaaacgaagaccaaaaagaaaaaccgcatattgctccgaccgcctttggccgagtcgactcggtccgctaaacctcccaaactccttgcactccacacgcctccattcacctctataattccacataattgcaactggttcgtgttttaccctcggaattcactccggctcaattgatgcttatttctgcaccgatagatttatcgcaatggctgaatccagtgaatccgggccgatcgcgcgagccaccaagcccgtcagcgaagctttgcttaacgagaaggtatgagctagctgggatcttcaaatggggaagttgcaatatagaatcataccattgatatatatgacaattgtctcggtctggaaggaaacatgggagaacccgttggctaaccttttaacgtcatataattagtgggaccgcgccatctcctctgtgatcatcaagtcctccctcggtctgtctttcggtgttgtcttctcggtgctgctcttcaagcggaaggcttggcccgcgtggattggtctcggcttcggtgccggacgtgcttgggaagaggctgatggtacgttcatctctctaattcattcggttcacgggcatttagaggggcatttagtgaagttggagcttcgggtcactataagataagcacacttgagcttgggcagaggctgtatgctgtaattttttcagcatcgagcttcgtaggcccttcaacagtgacccgactatccgcttttctccgagcctacctatctccaagatctaagaatgactgagctaacttgtacttagcctccttccgccgtggtgactcccctatcagagatgccctccgccgttaaagaatagctgtcaagtgtgtatgatacattgtacagaaggcaagaggccatcaatgaatggttgcttcttggcccagagaagaattggtataccggttcaacatcaacaccgaacgaggtgtttcctagatttttcccccgtcttttgaattcagaaaaatgattgaattgaaaacatctcctggcacttcacttccatagcatagagaagacgtacttttatcggtctcatttggcctttttggtctaccagaacgaggcttcgacaagccagaatgccattcgtgcgctttgttgattatagcagattgtagaaagagaaatccatggatatctctggtgaattcgcctgtaaccccattggacatacggagtatgttgtagatgaattccattagcgccaaaaaatctttagaacccgtgggcacacaagatataaacacattaccaaatactgtcatctactggaggacaaccatggcaatatgacaccgttcatgaaaaagaaactgaggttcaagatgccaggcagaggttcccggtaattaacatcacgtgtgtggacgtctagatagtttatcattggaccgctggaatatagttatactattgcccctatattaacttgcttgccccgaggattttgttcaagctacaacaatgactgcgtgtctaagatgatgctttgaccggagtaaagcacacttttcgtggaagctcgtttgaagcggaatacacttttcgtacctgcgttcaaatcgttatcaaaggataatctatctctattcttgcccgaacaaacaagataggatggatcccttcagccgactcccttggtttgctctgcaaaatgtcctgtccgctctgccagatctaccgtcgctccacagactacacaacacatccacggaagtcgcaaccttcctgcaccaaaacaatgacctattcgcccggattgtggatgccataatcgaaaacacggcccacgaaagaagcctgttcccggttgtgcagcgtgatgtacggcaactggtgatcatctgggctgagcagtcaagaaggcggcaacagcagccaactgaacagaacgaacagcaagaaacagccggaaacccgagtgtcctcgacaacctgcgataccttgcgagacatggtttcggccgcctaacaccgaatttagggagcatatcaccgtcgacgccagcagctgttctgtgtcggctgctcgcgctaatgtcccggttgcgctgcctcgtgcatgcgtcattccacgcactggttgcgaagtccctccagctccggatcgagcacttaccgaagaaaagtttatatatcaatacacgcaggcttgggcccagccatcgtccgcaggggatcccttatacgccggttgatgttggtccaatgatgtgggttgaagagcagcgcctgctcgagagctttttctgtattgccatcttctacgaactgcgcaagatgtatgcgaatttctccgtggtctcgatgcgatcagaaaccttccagatttcgtcgcacgatacggtcgaggacttttggaagaaagtctttcagggcgagaagggtggccagctggagcagatcgccacgactctttcctggttagatggtcaggccggacgacgtgaaaacgtgtactcatggctggcctccggaccggtttcaacggaatacctttcttactacccatgttatacaccgttgaatgatgagcaatgggaggacgaaaagacctatatacatgactatcattcctcgcatggtgcaatgtctttgagtgcagctcgatgttctttaacttcgccgctgcgatgcgtggattatgcggcctttcgcccgtacggtctgatcttctggagtgccactcggatggacgctttgggatttcggctggtgtttgggattggccaccatatgtggtttgcactgtcctttgtcctcacggataaggattgggaagacctagtcgcacggcagctggatcggagcttcaacccgatcacaatgtaaattttgagataatcaatccggaaccttggtttgctcaattcaattgctaacttgaatctactattctacatgggtcggcaattatgaacttatttaccctgccactgcttgtctggcgtctagataggagaaacaatactggggaattgacccgaggtaaagaagccttacatggttctttccgttgttcgatccggccttcatatcatgcgccattttcgcgcatcagaactcgttcgaattgaatcgctctgtcgccagcttcttgtaggctgttcttgggcggcgccgagggcgcaggcgtacttgcctattatggtggtgatgcttagagcagatacctacttatgttaccttcttaaagaaggaacctacacgcttatcagttgcaccagcttctagttgaaacaaaagcagagactggacagcctccgaacttttaagaatgatagacacacatacatcacacaatgtcaataaataggagtgataggtgtactctttatacttcctctaggcaaataagtttatcctttaagtagagatagctcgtaaaaatggtagtgagcctattttggggacagaaataactcctttccaggcccgcggctttactacatagccagggcccctaacagctagagctcctggcaaagattgatttttttgaaaagtgtatttaataccctcggaaataactgattactccgagccattgaccggtatattatcaacctaggtcacagaacaagagaaagtagcgaatgaaaaaatgaagtaaattgagcaaaaaaaaaaagagagagaaagttcaaggtagctcgcagtttattcggcttttccttttccttttccaggcggaggacgcaaattctcttcaacggcccgaactggaacttcaagacgcctgggcatcagggaagggccaagagtgacacctatgaagtccaaatgggtcaccatggtccaaagcgcccaagcttcccatgacatccccataacaaggaaaatggattcatcagtctcgtacgcgtccgaaatctccactttcatattgggcggtagatcttggatcgctttttggaagccttgtaggacgtcgctatgacctgatatgtggctgtgaccatgcaaagtcagtttgacaagtacatgtttctcatttgcatgcgaggaaaggtgaggaatgcgcgaggggatagtgtagttcttgaacacaagtctgatcggctgagtaccgctaatagtttccatcacagcatttggagcatggggcggtttctgtctttgaatttcttgaaataaggcggctgtggtcacacttgattggcctttgaagtgctgaactgcacggaatagtcgcatagtaaatgacactgtctgagctcgaggatttgttccctcattggcaccacaggccgccagcatttggatcgttcttgtctgctgcgctcttgtcgcagcaccagagtaacaacaatcaagtaccccgagtacatcgacgtatttcatagcatccggttcgtcccaaaagtttgcacgaatgcgggaccatggcatagacctcttgccggagacaaaagacagacgcccgtcagatatcattccatgcccgacgtagtagaatacgaataaggaatgccgtttggaacgatgacagtcatacatgacttcgcggatcttgccttgaagattccaacttggtatcgtatctgatgatttcacaatgtactcggtatactggatgccgaaggtttccatcactttgcccatagtggtgatgtctttgtctgcgccagtattgtcatcttcccatcgtacaaggattgccactttcagatcgtggacattgccacgagctgctgataccttttttaggtctgctttcagggctgggaggtggtgaaccagaggtgttctcgaagggaatgatgtcgtagtggatgagaatgaaaccggggcagaatggtgagacgtggtgggcgataccggatcagacggctcggccattgtgctaagcgatgttagtccagagtacggattggttcacgcttagtactcacgttgtgaaaggtgggaaagaattgatgctgagtgtgacagtctgagcgacgacggtggagaaaagagggaaaggacaagtttcaagtaggataaactgaagcgttagcaggtgtaaagaagagagttgaaaagtcttgtaaagtatgtagataggtgtagatgtgtgaagagaggaagacagagactcaaggcgactgctgtttatatagtcggccttgaaccatagattagacgcccgtgtcccaaaagtgaagtgaaccacctttctatacctatttagagaatcacttgatttatcaaagtaaagcagtttaaattagcaagaatagcagtcttgttagctgttctcttagatgtctttatcaactatatatacaaaacacgcgtctacttaaagagacttcagttttatctaatttatttctattattcctcggggttttcatctgatatttcataggtcaatacttgcatgcattaagagtgtatgagctcttagcgagagtgtgattatgaatacttaattgttcagagatatcgaggttcctagatcttattattagtagaatgaatgaatgtctgactcataaaccccggagaagatccatctctagaagccaaggaactaggaagcagtcaaatattatcatgtcatcgtaaatttattcgcagatagggaattaattatataaattcaagcgcgctcgacagcaacagcagcagtgaaaacaaatatcaaaagaagatgccgtccataaacaaaaactcaagtccgctctcaaagcttcctgtccgaagtattcggacctttccgatcatccaacccaagcgcatcatcaaacgacctccgctcagcataaccatgagcctccatgtcattggggtcctttccgtatgaaacggagagatcctcagcatcgatgtcaacctcgttccaggtagcacttgtctcagggacggggaagaaccacgtcagagcgaagtacacgccaccggaaacaatggacccggtgaaatagttgatgttgtagatgtattccgcgccgatgggaacctcgcgccccacggcaccggcgaagccaacgatattaatcaggataccgcaaatgtatgcggtataggcacgccaggagaagccgccgttgtaatagtagcagtctgttttgctcgcgctgtagagagatttgacgttcaagaagcccttgcggacgatgtagtagtcgcagatcatgacgccggcgatggcggagaggaagagggaatatgctgagaggtaggttgtgaagttgtttgaggtcgagagcaggttccactgtggattttgttagttttggtcatgtcatatgtggggattgaataaacaagtggaagaacgtactggacacatagcgaggccgacaatggcgcagatgtaactacctcgtcggatgctcatgtatcggggtagcagtgcagtcagatcagtacctgccgagatcgagttggcggaaatgtttgttccgagctgagctagagcaaatccggtggcgatgacgaagataccgaagcgctggccggaactggctccatcaaggaattttgcgaggagatcaaggggattccatgtgtagccgtcgttgaagatcaccgatgaggaggaagacacgatgattccaatgaatgaggtgacgccaaagccgaccggaatagtaaatagctgggcccaaattgcatcctttggtgttttcgcaaatcgtgagaaatcggggttgttcatgataagtgccgcgaagtttccgatgcacgacatgattcctttcaccatcgcccatgaaagatcgcttccgtggacggtgttagacttgtggataatcgggccgagaccgtgagcacgggaaatggcccaggcaaagaaagagatggcagcgatgggagagtagatcgccttagcggtgaataggtgacggactttgtgaacggggaaccacaaggctggaagcgagaccagccagaacaagaagaagctgaggaagttcttggtgtcgacgccagcactggcagagagaccattgtgaaggttccggtagctgggccagatggcctcgatcatgacagtcacacactgacctagtaatgtataagtacgcgtgttttcaccggattggaaagatacatacctccgatataactctgcacgccataccaaatgatagccatcaccacgcggttaaggacgggccataaagaaccccatattccgaatgaagctcgagctgtgacgggaaaagaaatgtgatagacagcgccaattcgtccagtcaggcacacgaagcctgcagccacgaaatatccaacccagacacagatccaggactgccaccaggaaagaccgtcgacaatcatcgaggaggaaatcatccatgtgttctatatcttgtgttagatgccaccaggcttcaaccgggcaccattttgagatactgacaatattaagcgagtctgcaatccagaaagcaacaaaattgatccatctccattgacgtcgttcagggtccactgtattgtttccataaattagttttgcattctttgtggaccacgatgaagggaggatctgagatcctagaatggtgagtctcacctggtcgtagatcactgttggtcaacatcatctgggcattggtgagtccctgctcgtgctctacggccagcttgtcgagtatccatttgaactggcccatgttggcgggtggacgtgtagtcttggacgtataggcttgttgctaatagttgccagtagagtgacgtagtcgaccgaccaaatgaagtgataatgcaaatgtatcgcggaggagttgaacaaaagacgaagcttgaagcagggattataatggggacatcagtgtcactttatacaattacccacgtggaatgactctggggcgaccctgtctccatcgtgaatcctcgtttccccgagtgagataagaaattcgttgtctgagtgtctctagttttggaagcatcgacgatgatcggagccagtatgggcctatcatggccgcttacggacagtgaacgaatgagttcaagtaagacttcccgacgttatctgcaaggatttgccggaaaattcgcaaccttgcaatgttgggtccacttgtctccatatcaaaaatggtatcagagacggtgattggtggaccctaatctatacattgatatggagaaaacctggagatagaaagatcttggcgttgactcgatgagatcgagtaataagataggtcacgtgtataatgcctcaggccagattccacgcctcaggccaggtatcacgtaagcgtctcacttgggatgtcagtgcgaaaaaaaaaaaagaaatatacaacatatgtaccagatacgcttacttatattactatatctcatgtgaggcgaaagaaagtaaagataaataatatgttcgcatacatactacagtatatggagataaacagaagtggcatgcgagtgtgcaatagtgtataattgaattcacagatcaactgtgaaacgagcctcctgaaaaaaaatcccaagtccctatgcaatgatgataaacaatatgatgaaagagaagatttgctccagtgaaccagtcacgtgtatactctccgatgtggccgactccctcaaatgcgatgatgatgatgatgatgatgatgatgatgatgatgaataacacagaaccgagttcccgaaaaatcctatgtggacacataagaaataagataaaaatgaaacacatacatgaggcgaaacaaataagaaaagatgggacgaacgagaatacaaacaaacacatctcccagtcggatacatggccggatgatcagtttctggatttgtcgcagacaaataacaggacaaggacaatgaacaagataatacccatggtaaatggcaaaaataaaactcgaagcaacttggggggtatcgctgtgacgggtatggatggcaatggtgtgataaacccgacaatgtaggcaggcacagatgaaagcaaagagtgggatatgatagaatagacaaacgccggaaccttggttgatgctgacatggataggaatacaattccagatcgggagagggatgggaggaaagaccagcacaaaaatgcagtggtcgtggtaggagtgggcgaggaaagataagatgtgactctcattgcacgaatgatgagttcgacgttgttgacacagtgggtgtcaggttaggagagctttccttgtcctcggggcttggagaatcactgcgatcatgggcttgatccctttcgcgctcggccgatgaggagcgcttgaagacggtctggccgatttggcgtagaaggcccatgcgctcagcgcggagctcttctaggtccagacgctgaacggagatgggatcttgcttggagatcttgcagaaaagggtcgagaacaagtactggtcgccgctggcatcgtagaggggcaagtagcgataaccttgcgagagactggtgagcttggcagtaaaagtcgccagctgcacactgttgttattgcctgcactgcggccgtccattgagctccagacagtccatcgcacaaagacaagatcgggatatttagtttccagcgagagcttgaacttgtcattgaaaacggggctgtagccattgctttgctcgatcttggtgcggcggcgatgtggatatccgataccggacatgccgttgcgcccggaagcatccataccgccttcgccgaggacgaagctttgaccacgatcatcagcactgaacatctcaatctcaacgtaagggttgatgctgtcgtcctgtccgatggtgcgtggacgggggagttgttgtgcggaaacaacgtcaactgagaatcgaaccagtttgcgctccatcttgcgcttctgatttccatcaacagccgggaggcgaaggctctcaggcttgaggatgtagccggtacgatcagtcccagcggcgaacatagcctggttcatttgcatgccgatgtcgtaagtttgccagttgagtgctaccatttgcacaccgcggcgccagaacttgttcggatcaaaattagatgaacgaagtcggaatccggaaggatacactcgcgtaaggtacttgcggttgtgtgcttctagtgcaactttgttgtcgtgactctgacagacactctcgaaggaccgctcagcaaacgagtatatatggttgtaccgtctgctctctggagacgagaagctgcgccatttgtagccgcgggtgtagacacccaagtcagaaagaggcttggtaatcttgcttttctggcgccgctttttctttttgtcagtgtgaacagacactagagctccgtcactgtcttcagttgcactgctcatgctcgtggcagtaagcgagcgcctatcctgcaagatcaaagggccaacgctgtcgacgggacccattgtaggaggactcgagagcgagggaagagctagcgtgctcgtctcattgagcgtcggtcgcacaaacggcgtactaacactgcgtttgcggccgtgggtgccgacggtgccggtattttggcggggatcaaactcattctcgtcacaggtcttgactttgaccagaacacgacccttgagctcttccggtgaagggaggatatagcagttggtcatcaagggctcgaggataagacgttccttgaatgtctccttcatgatcttgaccattgccagttgctgttccggattgcagtgcacctcaagagaaagaataagtgggaagtcgcatgtgataaaagcataccggttgatgacggtgatgcaatccgcaaagaggacactggtggtgagagtccgcccgtgagacactatggggcgtccatctgcaccatcccagcaatcgatctcgacacaacgacacccttgctgaagcgcgctaacgtaagcctcggtgcttgatgcaccagccacttggcggcccaggagataagtgttgtgagagctcgagatgaagtattcgttcaacggtcggtcgaatctcgactggggagcacgtgaagcgtagacaccgttgctggacgaggacaaaaatgcggcaaatgcatccaggttcatccgcgacacaggtggaggaaggtcggatccttctgcagaaggagtgcgagatttagaggccctccgaacgtacttgtcgaacagtgcagaccagtagatcctgtcggattcgatgtcttcattttgcacatcacgaaggaaagtcaagaactcttccagagtcatgccttctttcgattttgcggtatgaagcttgaagatatctttgacatcctttcgttccttcagacgcaaaaggaaatccttgaattcagaaaaatccaacctgccgttacaggcagcgtcagctttagtgaattgtgcccgaagcatgttcttggaacagttgatatgcaagctgcggcagaccttctccacggcagcgaggtcgagactttgctcctctactagagggaggccctgcgggaaaagtctcgacatctcgcgctgccagtgtgcctgcagaaccgcttcgctttggctcgaaccagccagaccagacatgagatcgattctgtaccgagagatatgctcaagagtggtgatccacaggtcaagaatacggtcgcttggagcgataagatgcaaggttttaaccgctcggcccttggagcgatcagaatccgcaatgacaatggtgaaccatcggcgctccaaatcttcggggatctgatgttcttcccggtaattgcgagcatcggcaccaacccggatttctttgatatcatcgatatagaagcgtttggctggattagagacatcccaaaaaaccttggcggcatctaagtcaaggaaaaagcggacttgctttctgtgtttcttggttaccttggtgaggactgtgcctcgctgcacagcagagtctaccttgggcgcaacggcaacggcgggaacgggaccagcctcgcgagccctattaatacgactcnnnnnnnnnnnnnnnnnnnnnnnnnnnnnnnnnnnnnnnnnnnnnnnnnnnnnnnnnnnnnnnnnnnnnnnnnnnnnnnnnnnnnnnagggggggagcgggcccacccgggggagccatattaatacgactctcgctgcgaagactggatgcctctgagccagcccatgcacccaggttgtccaaggtttcaccggtttcatcctcgttgcttgaatcaagggcgctgtctcggacaggttgggaaccggttttgctatcactgcgccggcgcatgataatgggaccagtgctccggtcccgcttctcgttttgggtggtagactgcctcctgcgagtcaatttgttggcggcgcctctcgagattcgtctcatgagacccggcgccttggacggagctgggtcattaaagctggaagggtttgcgtttccaggaacggccatgatagattcgccgaggtcgagggggcctggcgtaggcagggaagaaccgttcactcggccaaagaggggggtgccagcaggggttaaactatagggtgtgccgtgaccagggatggatgaggtaggagtacaggtcggagaagaggtgaaagctcgtgtggaagggggaggacgagatgtgacaacatggcggagagaagtcggttgagggagagatgtcgcaagctttaagttggattgggtgtcagcatccagagtcggcgaggtagtcgtagcataagccatgacgaatatcaaaacgacagctcagctgtcgatagaggaatccaagcctgtcgtataaagtgccaacgtccgagtcacctggactcagaaatggacgaataggtaacagcgtatgggaccggcctgctgtcaaggttcgcaaattttatgcgatcagagccaaaagagtattctgacacggcaaaaaatgatcgttcagccacgtcctcagcagaagttcaccgttcctgaactctgctgcatcttgggctggattaggtgtagtgcggagagccctgccggagagcagctcacggggggaaataaatcgcaacaaaagaagatatgagcgattaaaaaagtccctgataacaattgcaaagggcactggccctgtgcaacggccaatctcccacgagtgatattctcagccgatgctaaccactggggatagaacgtcacaaacgaaatcaaccagggaatggtttccagcctcgaggaagtggaacgtgagtactcgtcttgcttcttttggagcccggccgattctctgtatgtccttccaatgataccaatgctacccctctcttatgcgtgtcgatctgccggtgcgtgggggaagctgctgctctgcagtggaagcggggagtgctgtggtatggaccaattgatcgtggaatcaccgagtgaattgggcaaggcagcgcagaaccggttcgaaattgaagggcgtgcgccaaagcgagtcaaaggccgaatgtgatgcgtatgcaggtatccttgccagagttcagacaagagccccaagaaccggctttgggtgcttgcggaggtggacaggcggcagcaataaaaaagacccaagagtcaagggttctcctagtccgacagggttcgtggcgcaattggctgagatcggagactagcgatgcggcaggcgagggagtacccgtgctagagtgcagggagtctttttccccggcgcaacgaagctaggataggagaatgcgacgaaaatcggcacttgcgacgaagttgccaacgcagtggatgcaggcggtcgaaagaggaaaggagcaatccgagactgggccgagttagggagcttgctgatgctggattatttagtgccgttcgaggatcactgcaagctgaatgcgagtcgaggagtggataaatttgcggaagatcatgcgacgagagggagaagacctgcgttgtccttatcgtcgtatgagtatagagtttttccttctggtttcaaggaggggaggtaattgaagaagagttggggttgaagggggaaaaagcgaaaataattaaatccatgaatcccaaatccgcaaattgaagctgcggtgggtactgggtacttacgatagacgtagccggcggtatgcgaaatcgtgtaccggatacgtgtattgtccggtaaggataaaatactggtattctgtaacaatccgaagtatgtcgtaatttggatattcgacctctttcttcgttcttctttttctttttctgtgggagagtcaataaatattcaaggacatcggattcaagcggtaactgctgatattccagttgtgatggggataggaggaaaaatgtgtgtatggtctgattagggcaaatgtccaagactcacccagtgtagagatgaaccaatcagtaggaatgaggctgatatctcaaaagaaaaaaaaaagaaaagtaacaaagaattctctagagtgagaaggaggaaaaggagagggcctttgaattgattaaatactacaaccaggtgcaattgctcatccccttcaggcatgcccctacagttaggtactactttaatacccaagtgcctatcaaaatacagagctgcctaccatgagatgacgatgtggaatgattgctaggcggaaacccgttgcttggtgccattggacgatccttggaattcctgaggaatgctatcggccaaactgagccgatctgtgtttcaaatgtgttgccctgaagcgacgggaattacaatttccctacaatcaacctatgacagattctcctggatcttttgtgtgaaaaaggggattccccctttctcttcttcagaactcgtctttcataatcataaatgttccgtgacattatggattatagtggatacaagaatcactagcagtttatttctttcagatttatagtccgaggcaccgccgggctctatttcccccacattgcagcccagttagtcgactagtcgacttttaatataatcactttgaggtttttactctgtatctgttagaccataacaggcattctttacctgtattacttccgaggaaatttccgcttaataccgatagagcggtccggggaagatatgcggagccttcggattgctgcgttttgatctcgagattcaattagactttcctgttctccctgtgatacacggtcttatctagtgttgttgtttccttcaaggttgtgtttgtgttcattgttgactggtcaggccctatctgcacctaagccctgacacaaaaaaagagtgaagtcgatcacgacacatatcaccattttctcctattcaataccttggtgggggttaaaggtacggagtacaaggtatctacatcgccgaaacgtcgaaattaaatctcatccctgaaccggtgaggcttggtgtggcagtgaaaaaaccgtttaggcggtgcagaacgagtggattatccaacgtaaaaacagatcgtcggggagtttgaggtctctgtttttgtcatgaacactacctactccgtgtacgaggcccgcacttcccgcagcgtgattccatgctttcgtattttcagccccccttttttataccttagtctcagatcctccagcttggcttatacctgtcttgtcaagacacacacagttacacagactatacgatgcagagtgtgaccagccgcaatgcataggaacatctgcggggttcaccagcaaccccgcagccgttggaacttggtgagctggcgatgccgtgcttcaccctttccttgattttgcttcacaactctgtgccgctacagccggagaaaagaaaatcgaaatccctcagcacccctccataaaggctactcatgctactctgatcctgggctcctgcacgtcacccgggtgggctgttatggactttagcgttatccaaggacgataaccaacagcccccgacaaggatttggttcagaccttagggatatttcccctatggtaataagataatcgagtatctaggagccccgcgtacgctcacaacgtattcggaacgggcctctccttgtggattttatacgccgcaagatcggaaaaggcgacgggaaggtaaaattacctaaaaggggaaatagtcgtcactttttagttttctttttgctcgtgttgaatttcctttgtttttttttgtgggctgggaatacggtgctggaatgaaatgactcatatgccccagtatacacgcaacttcaaaactacatttttgagccgaatctattgctgaccgtgtctcctgtccaatatctgtgcgctatcgacgtgacatcgtgcagggcggttatggcgggttaaaagaataccctcggttccctgcgacagcacaacagcgaaatagattaaaacttgcagggagatcaaacccagttctgttattattggattatagaaagtagaccgccacgttgtctaagagaccattgcaaaagaccgaagagtcctgtctttgatccatattccattgtgcctcgtcagccctaatatagctaccccacctagtaatgaggtaaaaacaaagagcggtggctgaagcaaggatctgcgcgttcgttacagccactttttccgatgacagcgatgtgataatttctgtcggtcaaaacatcctgaccgctaatcacggtgctttagatgatccataatcaaagttgctagccagtcagcgatctccaccagaatccgactagggggttacagacgggatgaagaggggttgtttagcgaactccatttgcctacattatacatggactcgtgcatatgcacattattgtgaagaaccgtgctatcaggccatgcttgcacgaatgattcccagctctgacgtgagacatgcgacttatactaggctaatagcatgatggaggtgattcagattcagattacatatttttgtgtttcggtaactaggacttggtatgtacataggaaaacatgtcttactatttttgcttccaagatccttggggtcttccattggcttatggaatttgatgtccacttgacagggtcgttctcgtatagagtacaagctagtgtattttatatatgacatcgctcaggggaacgttctgtttctcaatacttccaatggttccttctggaaggtcaaaaatactggtacagtcaatatagtagtaacggtaatcgaacatagagtccacgtcattcttcttcatcttgacggagatacctatctacccgtggacttcttatatcgtcgagactcgagagtaatctgcaagatttgaatggcgtcatactgcctacagaggtattcagcctcctgcactccattttgatgtgcatgtaaacaatacataccagtcaatcttgcatccgctccttgctacgatcaacagccctaaataatgtccccccacttttgacggcgggctctccctatgggacgaaaccttcggcgaaaaaactctcttatgctctttgttccctttgtgattctgtggggagtgcttcgattgccgggattatttttgtaagatcgattggattaataggagaaataaaaaaacttatttctttcatatcaacactaatcttctcgtaaattccagaatatctatttaattggacgacctatactatttcaactcccaatcgttaattagttagtaaccttggaatgattgtggtgacatcatgaagacgcaacgagaaccaaatttctttcgttacggtattacgtgttttgatacgcgtacagtacgtaaaaagtcaggtacatcgaatgttccttgggaccttccgagtttggaaatcccagtatcacattacaacatacaacatacggagtatagcgcaagcttgtcgggatctgagaagctcggccttccaggggcactcgttttttcttgcttaaagaggcaaataaaaggaaaatttgagtactgagctatgggtctgatcttcaggagaacggaaggggctgaacatctccatttccatttctggagaatttaatatatattctccctttctgagtgccattactactatgatataactgtaacatttcaaatgtttagtttgggaaaccgcaatatatattccatctctgtactgtaacactcattcaaaatagagttacctagcacgatttagactactttcaagtattccaataacaatcttacatgctaacattgaattatacagacccagcggaatggaaccgttgcgcctcactggggtccttgctccatcaccttaagcctcgcgtacactttcttccccggttatatcatgcaagctgtgattgacttactcgaaacagccattcttcctctcgagatacctatcaggcatacaaacacccccgggaatacagccccggcgacgggctactcggccggatgtacatcttctttgggttataccaaacttggaagccagtcaaaagaagcaccccgctttgacgcatgcacgtcgacaggcctctaccttcgaaaatgacagtgcatgccagatactatccactagcttacccaaagaagaaagccatcacaggaactgacacgtctcagacatcccccactctcgtccctttcagcccagcctcgtcccgctcctccactccttcgatccgtgttcgatgcttccagtgatatatgcaaatcaagcgaggctgtgttgtacaacataggatcacgtataaccccacactaatacggaaatggaaaaaaataaacatgcaaaggaggccatttcaccatcctcgggcctctctctctttgatacgacaccccgggctacctctcgttggctcagaatcatcgcccccaatcaccgacccggctgttgctagatgctggagattgtctacccctcctggggcatttcgattccgactgcaggaaggcagatgtgtgtctctttccttttttttttttacctttttccgccttcctgccgtgcatgtgactcaacttggaatgaatgttcccatcatatccgaggatattggtgcaacagtatcatagggcgcccgtggttcgcacgtcactgattgtgtaaccataatcatgcattgcgactcgtcccggtcctattcgaaatgatatccttgtttcagaggaaactatcccggaaccggcatggtgccatcactcgtctcacggctgatctgttcgactttcttacgttgtacctttacgacggtgcctttttttttcattgccggtgcggattccggattcaactccatcccatgtctgtatgaggcacggcttacggatttcgtgcacggtgtcgggcgttttgaatgctcgtttcataggcggcgtgcgatcatacgattagggagatcgcatacgtggccatgagtcggataccaagggaagtacacatatgtttcttgaagcttgcaatacttcacgcgacgtatcgtatacctcagacaaagcgggagagcgggagagcgggaaaggaaacatcaagagattgcaacaacccataagcacggagtactccgtagaatccgggacaatgtctcacagtccactcatctttgattacccgtcgtgttggatatcgtggctgaatatctatcgccgacagatattgcggacccatatctcggaatgacacccggctccaagcggctccggctcttagaaaaacaactccccactatactaacctgatctcagtctcgcgattggtgcaagtcgattatggcttggatagcagagacctctgggcagcaggctgacgccattctgaagcagtggtatcagccccagtggggcaagcaagaccaggaaaatatcaccggaaacgccgtcgagccaatgtgccagcttccaaagccagcttagctgctgttagctcaacaaatccgacatcccgcagctacctcaatctaatttatccgaagcactcatttcctctaccagttctaccacacatccccacacatccatccaccaagcaaattcgcattttaccatataccaaacatccgggacacaaagcattcgccagacgtctagcggtttatacatgtcacagatctgagccttcccatatcccagaacctgaaatcttgaaacggaccccacactcagctcctgtgggacaacgtggcttccagaattttcatcgaaggttgtccagcccaccccgggaaatttagtaaaggatcagggtcaaaccccgacatgtcaggatctaattaagatgacttcgaacacgagctgttccttcccttcgccatctttgaggtctattactgacagaatcatgccacgggtcgcccgggagccaatgtcagcgaatttggtccgcaggtcttggcggtttgacattgaacctctagcgctacccgggacgacgacggtggctggcggataggcgtatcgaaacctgttgcagctgtgggtcctttgcgggttctgttgctgtcgcaacgagtagtattatgtcccgtaatatggaattcgtacgggatccctccgtgtacagagtacagtatagggctatagttggtatttggcggtttcttgtgggttttaaatgctgtcgtctattctggggagcagctcggggtagtgtcgaatgaatgtattgcttgcattcagcctcctcttaattttggcgcatgagctacaaagaagtacatacctgtgaaccatggggtcggtcaggtgactttgggtcgacctcttactagaacgaatcattatcttcccccaagctttcagtgctcacgaaatgagtcattccactttagttagctagttaactagttacctaagactcaagagtaagacccgacggtgacagtacctaataaattacaacatgatacatcgctaaattatctgcttgcttcaaagtatgcattgaaatcctttgtaatgcatactgtgggcgacgtcaatcaagtttcataagttacaatataacagatccctggaaggaacgatggagcgttcttgcccgtattggagggaaacgctccttccaatgggtcaagaaacaagtgacgtggagaaggaaggatgttcacggaggacttcctggagtatatacgaccacgatagcgagtagtagcgctatataaagtagtttctcgggcagttccctcgtagaaagcgcacgatggtagataaaccagtattaactcaggcgcttgcagttaggtcataaccccctgcccctaatactcctgatgtacagctgctctatctccgactgggacggtgaaagccgctgaatatttagatgtttatctaggaattgaaatgtcttctgtactgacaacccaatagctccaatcttagcctggagccctccttcttctggggatcgaccaatccacatctctcgtcggttatccccgagatgctcgagggcgttgaacacgcggagggtctcctcgtgctcgaggtacagcgactgcgtagcgccggatacgagcacgggacattttacatcatctaggcgactcgaaccgtccggtcggcggagagtaaatttcatcatctcaaccaaggtatccgtcggtgtcttcaccccgaagaaccagatggccaatccaatttcccaccgggcctggaacgaactggccatggccatggccatcatgctgttgatcagctgcgtggggatccagccattgttccagccgtcgaggagcatcggagagatatggttgcggacgaaatcccacatgtcgtagaagggatcaatagagacgcaggcatggatgcgggggtctgccgccgcgcgtaacgcatagtatccgcccatggaagcgccggccactgccacgtgggagagatttagttccagctcgggatactcttcgacaaaccgctcgaggaagtccaacacccggccgacgaccaattcccagtcgggacgcatggcggtcttatcccgtcggagcatgatcccctgcccaggcccttcgaatgtgagcaccgcgtagcctagattcggcccactggccgcatagacatagtagagctcctcttggatggagtccgccccgcccagactgatcaacagtggtaccgactccttcagtcgcttcgacgcgggcgggagataaaggtatccgggtaggggatacggttcgaaggggatactgaccgcaaacgccgggccgttgcctaatggaagcgcctgcgcaaatgtttcgatcaccttgagggctagagggagtacccgaagatccggcgtatttggcgcatcgtggaacatgtacccgcttgcgcggtagtagttggatgcgcgcaggaatgcccgccgtgccgaaaccctgtccccggtgcgcatggcctcatcgcccagggcccgggctttgtttgcctgtgctagccacgcgcgatgccagctttcggggttgtcgttggcgatatcactggccgccacgaggcattccccgatctcggcgccgccatagggggcggcggagagaatccggataaactcgaagttgaagaaatcggatttaaaaaagcgatgcatttcgactgagagcagggaggattgagcgaaactatcgtccgtctatgttatgtatggtgttgaacttggggacaaaatcgcatgtccgatggtcgaccgactccgaatccgacggaggccagcagcaagccaggcacaggctctatatgagtacatattcgtttttgttcccgtttcttctccgagtgactatacaattaaccactatccccttgatcaagaaacaagcagcaccaaaatgggcgttgaactcgttgcagccgacagtctggccctgaagatcctccgagtgactcccttgatcgccacgacaattctgtaagtgagccaactcagcttcgttttgataaagaggattacccttaacactccaattctttagattggtcaaccgactggcacaatactttgcgctctcctcgtttctccctccttatacctccaccaaaaaggttgaccatgttggcgctgccctacaacactggctccaaacggtggtccctcgaatttggactggagtcatcggtatcgtcttgattgcgcgggtggctcttatcctcaatttgtttgtgcacaccgaagacttagccggcacatatgcgcgattgctctacggcattggcctgttcttctcgtttgcgcacttattcattgcccccacgatgttaaagtttgagacgcgcatgatgagtccagatacgattccggaagtgacattggagctgttggccgggtggctcaagatcaataacgtgcggatttgggtggtggacgtgccgttctgggtggttggagtccttgctacgttggagtcatgcaagatgtagagaatatcaatttagggggggcgtaggaaactggatgtagaggagaagggaacggggtgaagggtttagggaatggacggttgccaattggttgagtgcgcggttcgcgatagagagaacagagtgagaataaacataagcggtcatgtgatataaaagtacacctgaggcagagatcacaacgcagacaccaccttctcttagtgactttttccatttcatacatatcctgcagccatcatgctcctcccattgtcgacaccgttccaaatatgatcctccttgccttgcgctcgatgaactgggcgaaatttcaaaaaaggccccttcttcgcccctgtaacatggtcctgtaatgtgtactcctggcagtactccattccctcggcgggttcaagatcaaaccgccaaatgatgttggaaagagtcaagagaatctccaccagggcgaggccttttccaatacagctccgcgtgccaagagaaaacggcatgaaggcctctcgaaccccaggaggtccgtcttccagccagcgatctggctggaagcaaaacgggtccggatagatcgttgggttgtggtgaatgctgtagactccaacggcaacgtcataccccgccggaatgtgacagccatcgatcatcgacccgccttcctcaacctcgcgccagagagcactccccgcaggaggcgacagccggagagcctcatcgatgcaggcgcgcaggtattgacatgagttcaactgtgtccccgcgtggatctcctccgcagacgcaaaacagctgcggacttcccgggttactcgctcgtacacggagggctctctgctgatatagaaaagtgttgctgccagagtagtggcggtggtatcggaacctgcgtggaaaagaattattcctcgctacgacacgcgttatttttattatgttttctctctcaacacttaccagcgacaatcaacgtagcagcctcgcctccaagttcgtcaatccgcaatgtcttcgcggtgacagtatctttggctgatttgagatatgaaaagacatcccgctcctttagcagggaacttttcttgaccctctctgagaccgtccgtctgatgaacttgataaagcgatttctccaaagaatcgaccgggagaacagcctcttatcgagccggaaaagggtgaggatgggagcctgcagaataacactcactcgaacattcgattcttcaatagcgttaatgatggggcggaacttttcctgccggatggtgtcatagctagcgctgaagaccagggccgacatgatgtcgaaggtgaggtagtcgactttgtgatcaatcagcatgggcaattcattttaggcaggttgacaggactatacaccactttgccatgtcctggcctttactccattttccatcgttactattaagatcgccctggagaataccgcagagcctttgtaccagctcgaggacacgaggctcaaaggaccgaatggctgcgtccgagaagccttgactcatgatccgccttctctgcgcatgtttctttttgtctcggagcgtgagggtgttgggcgcttgatggaccagcgtttcatacactttggacttgcggacccggctcccaatgccgtagatatctatccagcctcagtgacagtttcgcggcgtgacattcgccttgctcaggtaggtacttacccattaccgcttgggctgtattaaatgtcagtcgatccggtgcgtagcggatatgattccctgtgaaagaatcagtttatcttttgacacggacggatttatgaggccctaattgttaccgtatttctgatggcaccgccagatgtccatgtggatgtcacccttccacgcatggtaagccgcatagagattggtgaccctgcccaacagcggtccgggatatctagccaaggggtgaaaggtgagtcgataaagtactagtccaacaatctgatttggtattgtcagtaaagactagataactagaccacgctgaatgtgacatacacagaccagacccccgactactagtagtcccagggttgtcccggcagtgagcacgagttgccaccctacagtattcattagcacaatcacgggaataatcatggtaacgattgaacagagaactgatttacactgcggccgaattgctgcgaaggcttgactatctcttgccttggtggctaactaatagacccgagtccgagtccgactatccgaatggcttccgggactatttacgactaaaatgcagcatatatacatctgaaaaggccccgattcatactggacgcaatctaaagaaaatttagtaacaaaatggtgaccgaatccgagtttcctccgccaccagccaatcttggtacgccgaagacgtgcccgccattctttgcgacttgattctgacattgctagattggaacaacattggcatacagattcgcgagggtaagacacaaccctgtgagatcaagaccacagtgtagacatatcttaacgtactacattacagtcaacggacatgtccaatgtcgatataacgttcaaacgggatgctggagcgagcctgaggtggtcaagggaactgatctgactgtcagcggactgtctcctgcgttaaattatggtaagaattcttctcgagcgagccaaacattgtgaccttccgcgttgactgtggagaataggaatgcaagcctacgaaggcatgaaaggtcagtgcaaatcatacacccgccgccaagttaaactctataacgttatctctaatgctccaatgcagccttccgctatccgaatggacatattcatgtgttcagactcccggatcacagcgctcgtctgcgccattcgtgcgagtttgtctcgattcctcctctgccaacggatcaattttcccgttgcgtgtcgttggctgtgtccatcaatgccgagttcgttcctccgcatgataccagtgcggcactctatatccgacccctagtcttcggctctggaccgcagattaacctcatcttaccagacgagtataccttttgcgtctttgttttgcccgtcacgggcctcctgggagccagggcggtggacgcgctggttttggaagagtttgaccgcacagccccgatgggaacgggatcggccaaggtagggggcaactatgctcccgtcctgaggtggtcgatgcaggcgaagtcacaaggctatggaatcactctgcatctggatagcaaaacccgatccgaaattgacgagttctctgccgcagggtttatcggcgtcaaacagatgggcgaggatgtcacattagtcaccccggatagtccgaatatcatccgaagcatcaccagcgagagctgccttcagctggcacgttcatttggatggaaggttgagctccgacccgtgaaatacgaagagttgtccgaattttcggagatcttggctgtcggtacagcggccgtggtggtgcccattagttcaataacgagaacggctcgtggggagaagtttgtgtatacacctacggtagaagggagctaccagtgtgccacaaagttgtccaaggcaatccaggatatccagagaggtctcgcagaggacgtattctcgtggtgttaccctattatgaggccagaaacctaccattcaagcaaagagatcgatatataggtgcacagcataacatagatggatataggggattgttacgaggaccccccccccccccccccccccctccaccccccctttggggattcaacttaccagccctccacatcccttaacgtcgaagacctacaatttgtatataaaccactaacaaaatcaagtcatttttatgacatcaagtacttcatcgtcaacaattacttcaataactgctccaaaaactgcttcaacaacttcaacaaccgctctatcatcaccaagggatcaaaacatgtaggtatgagatagaacacacgttttttctaatcaaaatgtatttttgactatacaaagtagaattcaaaagtgtagatttaagaattaagtctggcagaattgaattaatgccttctgtgtaaggaagaatcaggcagaagggaggtccttgtaacaatcccctagatgtaaaccaacgtctagcactgtcatcatttcctcctaggctggtcaaaactacgtacaaaacatccaaacagatactgacactatttacacattcagccataggtgaaaacgggaatcgctgtcggagccgtactcacgtccgaccccgatgcttctcccgaatccgaagagggcgaacatgactacacctacaccccttccacatattacaacaaatagaaaatgagctctgcgtggatcataccgtcggcagttaaaacaggaggtttacttgtagctcgaaaatatatctcgtgttattttttgcttgactcactggcggatagataatgcagtgggggtttccagagcaggatgactaagcggctgtgtgacataaagaagcactcccgaggcctaactagatagcaacgcagacacctttccacctctcttctcagtagtcaccccatggtgttctcctctctagcaccctactactcccagtgacgactctgctctcacacctgtttcgcaggcagggctgtcggtgcccctcaggggtcccctcttcaataaatatattctagctcggaacaccggcgaatatgaaagaatgatgaaagagaactatcatactatagtcccatattgtaatgattctgaagaggaattatctctacgttctcaacgcctgatcaaaactcaaaactcatatcgcaaaacgtatcccacgtctcggatgtatggcacatggctcagagcccaggcgacacaccgcaccaagagcggcaactcattcgctccatcctgatccccgaatctcgctatatcacgcaggcgtagacgcggagccaaggcttccagggcctgtggctgatcgagtccccagtacatggatgtccccgtagctttggcgatctggctccggtgctgcaccgcaatcataatcgatccaaccgcatcaaatatcaattgtcccgagggaaaccgttccaccaggcgttgcaataggcctttgccttcctcctcggtgagatacatcaccagcccctctagcaagatcaatgttgggcgatccgcgggtatgtcctgaagccatgcgtcctccatgaccgacgcatcgaccaatcgatagtctccgccgggggtcggtagcagtttacggcggagagcaacaacatcgggaagatccagatcgatccaccgcaccttgggtccccactggagacggagggagcggctgtcgaggccgcatgctagacagataacggtcgccccggtgtcctcgtgacgttcgataaattctgtagtccatcggtcgaacgtgcggctacgcatacagatcgcgctgaactgcatgcggtccatcttgagtttggcaaagtcgtagtcgatctgatccaggattcgccccgcccacaggtcgttgagaatgggttgtggatgctgcgcatccttgaatcggcctaagagcgtgcccagcatggtttcttgcgcgccggtaaggtgtattttcttgttatcggccgacggcgcccggacattgttgtcccgccggcgaatttgcatttggatcctgaacgaaggaaggatgaagttacccataactgtcggggcgggccgctctgcgatgttcttgagatcgtagttcaggaccatgtacgcaatcgccagctttagttcatgcgctacaaagaaacggccgggactgaagtagccagcaatgaggaaatgatttgaattctggagaatgcgtgcaccacttaccaggcgtgtctgccatgaccgaagatgagatgggtttcactggttgtgaccattcccatcttccggtatttctctccttcagcaggatccttgcttccatcgctctgggccgcgtattcttcgataggtcgggaatatcggaatgcatcgtaagactctgggttttcatacaagtcggggtcatggtaaataccattcaagttcagcgtcaaggtacttccgtagggtatatgccatccttcgtccttgtgggtgatgccctcgcgagcaatgaccttatgatccaagagagtgacggcgaaattgctgcgcctttggctctcccgaatggcactatcaattcggtatagtttggcgagacccgccttgctccactgatagttctcctctcggaatacacgatcggcctcctcacgaagggcctcaagcacggagggaccagcggcgaggatatcgatcatggcattctgcgccgtcatagctgtcgtgtgaatcgaggcaacctccaccagcagcgtccgctgagcgattttagacgctttcaactcggttagatcgccttcgagccgagcctgtcgaatgcaccaggtgatgaaatcttccggctcggtccagctattgtaggctggatcaccgttggcttttctctccatatccatgagccgtttttggatcacaggaagggtcattctgatagcccggcgatggtgaaaccagttgggaatcgccaataacgggccgagcagaggatggaggcttcggggtaaaaagtctaataggaagacattccgcaagacgctttcggtgaatccaaccatgctgctcaacagcttcgagttccgccccaggtcttttcccaggaccatccggttcgtaatctgcggaatgagacccagccacatgtcccagatattgagacttttccatttttgcgtatccagcccgaactctcggtcaatggaatcttgaacctcttcctgcatgccaggagtgagttcaccgagggcccggatcaggttcctgccgattgcgcgattgttaaacggatcctggggatgcgcattgcccagaaaattatatcttgcgtaaagcgagtcattgttggcttcgtctgcgctgatcacctcgtccgattgttccagcaaccatcggatctgggattggggcaggaccaccgcagaacgtcgaccaaagccccagggcacaatgaatggccgattgttttttgtgtactggaggaagaagcttagaaagttgtaatagcctttttatgcagtctggtccacataccttctcgtatccctcttctacccaaaccttgtgtcgagcgtaggccaacagaaaattctgtatcgttgctagaaagcccttaccgtatcctacttgaggtagcgagtcggataagacgccttggtcccatttggccacgagtagggtaagtatgaagataccaagtgccccgatgatgtggtttgtagtgatgcctaggacaaaactctccatggcgccaaccatatgtctcgtcgagacatcgacacctaacacggtggagtgaaacgacatcttctcttattttccctttactcgaagatgagaagtggaatccctacttgacactcagtttccagatttctacttgaaggtgtgtctgtcgctggccattcgatctccgtctccgaaccactcggattcggccctccgagcgcacaagagccacctccggcagggaactaactacgcgatattatttcatcgcatagaagatagatttacctgtattcattcgatgtgttcgtcttaatgtcacatcgggtgtgggaactcgcagtcttcgccataacggcgacttataagcatcttctcaacctgttgttatcccctcagtatctcgcttttcccatctatccgtctgcgaataaatccataccagaagcaaccatgaccaccacggccagtacacaggtgcaggaggagtacaagtccctcaccgcagatctcccacccccgccgaggggcgacatcaccacgccggtcctgttttcccatgaatttgaccaaggcaccaatggatacatgttcatcaagaacccaccgccagccggtgtgccgtacaccaacatccgccctgccccctccatagtgacggtggaagacctccgtggcaaggaagacagcgtcaccctcgaccatgactcgctgcagatcctgcagggactgacagacatgccacgcagcccagcggttgactgggactcagacaccagcatcgaaaccaccttctacccggcggtcgaggcggccatcaagaaagcaatctcgaggtcacacaccgtgcacatcttccgccacggcatccggcactcgaagaactggcctgtcccgtacaatccaccggccatgatcgcccatctagaccaaaccggtcccgcggcagtcaaccgagtgctaaggcacatgggcccggtcgacggcccgcgcttgctgcaaggacggtaccggatcgttcatttctggacgcccctcaacggccccgtctatacgtgccccgtggccatcgccagttcggccactgtcaaggatgaggatattcgcatctttattagtcatctcggtggggtcggcggcctgggcatgcccttgggccggcccgtggcaaagccggatcctgccgagcagtaccgcgaagattttggggctccgcggtacgcggaaggacagcgatggttctatttaagtgggatctcacaggacgaggctatgttaatccagatctttgattccaaggcgttgacgaaaggaagtgaagtaaaggggggtcgggcagtccattcggccttccgtgaccccaggacaccacagggtgctcccgatcgttggagcattgaggtctcctgtcttgtttttagtgacgagtgatgcttttcttttggggtttaattccgtgaaggataggtgcaattagttgcagtgcgaagggcatattcatattaggtaacaaagagcttttcatgtttgcattgtttgccagtagcctgtagggtaagaattattgtcggataaaccgtttccgtaaaatataggtccaatcaatggagttcaatcagtctgtatctctgtactggctcaactggcaatttatggagcctgattataaaataaaataaacaataacgtaactaattcacaagcgagtggccatctccaaaacacatattaaatgcaacatattctacatttatatctcaaccgtatgttcatcctatctccccgtttgtcgatagctattgataagacttatatatcaattttgaagagagtagaatactatcttactaccatttcaaaaattacagaaaattacgtccctaaaagctagaaatatatatatcgcagttataaagccattaattttcctaaggctgcctagatatgctagatatcatatctaaagcgctatgctacaaagacaagtccctatagactaccgttgttgagatatcaagttgtaatttattacatttactatgtgttttggagatggccactcgcttgtggtggccgctcgcttgtgaattacgttacacattgttaggattaatagatcctccggtattctctggtatgccgaccctgcgttctccgacaattatacttccattgacaaacatatatatgacattctgctttcacattattagacaaacgaattccataataaatcacttctctcaagtcaatcctcgatcgctatatgacgacaatcattctttcttttctacgaccaaagatgtatccacacccgcttcagaatccttggcattctcagacttgcccttctcgtccagtccgaactcagtgtccaactcttgacgcaaaggaacatccttttccaagagcacaaccagtaaccccaaagctgcaaaggcaatggccacttgccaagtcctcttgatgctatctgacagaactgaaacgaactgcttcagggtttctgacggcaaagtgttacgaaacgcggcggtagcatgctcgtatgcttgtccgccgagaagctcggtacgaactcgctggtctccgatgcgtccgggagcaaggctatcgaagcgattgttcaagacggctgctggaatggccgttccccactgcacacaatgtttggattagtattgagtctcgtttgcagggtctgaggtctcgtaccatcatgccaaaggttcgcaggaatgaccaagttgcagtggccagcgcggtgtcagcttctgtcaatggtgccaggacggcaggaagtaacgtgggaatgactatatggaggggtgagcagaagacaaaaaggggcaaatcgaatggtccatacctagacccgcaccagcagactgtatgatctgaaatcctacccaactgcctgtgttggagcgctcgtctagcagagtcaacagtccgaagccgataatcaccaaagcaaaaccagcaccatggatgaaccgatattgacctagcttcgacatcagggttccccctaggccagcaaacggtactagcgccagaatggtcggcaacaactgaataccagatcgggtggtcgatgaacccaggaccccttggaagtaaacgggtaggaagaagagtgcccagattgtgatgatcccgtgtaggaaggtcagaatgaacgctatcgcggacgtccggttcgaaaagagatggaggggcatcattggatggggagcgagtcgcggcgacgcttcaaacaacatgaagcccactaaacccagcatgccgatgaccaaaggcacaataacgtggtaggacgaccacggatacacggcgccggcccaggagagcgcgataagctatgccaattagccatcaaggccccagcgggaagatcatgaatgaaacaaaatcaaaatcagacgtacaatagcgcttatggtcgccacaaaaagcacgttgcccaaccaatcgatctgcgttagcttatccgcaaaggtcttttcctgattgtacttcacatgaaggaacaggatcaggatcaccaacgccacgccaccaatcggcaggttcagataaaacacccaacgccaggtggtgtgttggacaatgaggccgccgaataaggggcccaaggccgtgccgagcgcaatgacgccgaagatcataccaatgtattgccctcgttgacgtaacgggatcaagtcacagacaatgatctcaatgaggacgttgattcctccggcacccacaccctggatcacgcgtcctgctattagcattgacatattgctcgcgccgccgccgattccgctgcccaagatgaaggtggcggtggaaatgatggtgggccagcgtcgtccgaatacattggccagctgtccctgcagcggttgcaaggcggtcctgatggtgggttggttcgtcagcgcgcctcggacggggaatcagggggtgggcattggtcgcggtacatacatggcaagaaaatagccgttcacggcccagacatagcggtcacctccgcccaaatctgcgatgattgaaggcagtgcggtggaggtgatggtgccctccagggcagtcatcatgcccacaaagcaaatggcgacgaggatggcatagaaacggggccctttcttgaaggtagcggcagcagccgcggacttgggtgggttcgtggggccactgcccggctccccgtcagcatgttggttttggcctggacctgtctgttccggtgtcatctttcttgctgttaagtccctcggggcggatagtgactgtgtgggtggtgaaatggtgagactggcaggtaagagtgacaagattggagcagccctcactcgggggaatggccagggtatccatcatagcgaggcgtgcacattctttgtttgatcgatttcactattccggaacggagtcttgatttctaatctgatgcaggttcggagtcggacatctccagtacattgattcggagagggtgccattggtcactgtcctccacactgctccacattgcccccaaatttcgcgtaagcttctttgtagcttgttcatcgaatcaatttatccccatagtaataataatgacagttgttgagagatcggtgcatgaatttcctctacctattcctatctctcgagacatttactgtcttccttgggaaatatcaacaagttctccggtgagatgggaaggtctcctggtatggggctggtggcacggacccttaggggtaaagtgggtatcacgggagctctccgagacactaggccgaagagagttagatctatttgttattttgtggagatgaaatatgtacacgtttttttccgatcacaatgtagggttttttttgactatgtggagtagaattcaaaagtgtagaattaagtctggcagaactgagttgatgccttatgtgtaaagcagaatcaggcagaggggggtcccattagccaagtggggggatccctgtaacgatcccctttttctcttgtttgaaactgcgtttgctttcttataggcttatacaagttatttcgttaaacgatgagtacaaacaaatggagcatgtaattatatagtttcgaatggctcagccgacacacaccagtttacttttgtgtgccacaagggtcgccaatgcggtcactgaggagctatgcatcacgtcgaaaagagagcactcggcctcgaatgtggccaccagccaattgcgcagctcaaccgccactaatgaatccacaccaaactgcgaaagcgacatgttggggtctatttccgacaccggcctgctaaacatgcctgcgagaatcccgactagggcgtgtgtgatggtctggacggcctcaagcaacgtcgtcgacgcggtaagctgcttcttgatgttgggcccgctaccgtcaggaccggcggagccttccccggaaccggtgaggtcaccgcgctgttctaacccagcaaaacgggtatcatgattccagaatgcagctgaatcagaccgggtaaacgtggatgggatgcctgtgactacctggcatgttgtggatgttcgacggggatcccggatcgcggattcgaccaggcccaggacttcctgttcagacacagctcgcagccccagtttggtgagatggtctgcaactcgctgcgtccctgcgaccacacctacagacgagaccattcccagatcgattgacacagcagataggccctgtgccgcgcgatgtcgggcgagagcatcttgaaagctccccccggcagcgtagttcgcctgtcccgcatttcctccaaagccgctgatcgaggagagaaggacgaagaaatccgcatccagcaacagttcatgaagattccagctgccctggaccttcggacggagggcggccatgtaatcagcccacttcatctgttcaaagatgcagtcctatccagggcggttagcgggagtgaaaaactggaaacatcggtcggtctgttgttggccgttgacttaccttgagaaccatggccgcttggatgacccccttcaccggtagcatgcggcgagcacagtctgcaaaaacagccatcagctgactcttatcggcgatgtcgcagctgtgcagggtaacggtcgtgccatgggcttcaagagagcggacaaacgctttcctagaatgatcgagcgtcgaggcactgcgggagagcaggacgagatgacgggctcctctgtcaactagcatttgggccaccgattttcctatgccaccgaggccaccaacaaccaagtagctcgccttaggggagagaataataggtttgggagcgggcggcaggacctggatgtatgtattagctgtagtttccagagcgacttcgtcctaggacttgtcctaccttgacaatatcgccgggccgtggctgtaaaatgattttgcctatatgtttccccgtttgcatcgtgcggaaggctttctccacctcgcccatggagaacgttgtaatagggctcaccggacggatttgaccggcctcgagcagggtgttgatctcgccaaagatgcgggccacttccggtccacgctgttcccccagagtaatcaagtccagcgaggcaaagagaacactgcggacgaagggccccatctcgaccatactgttctgctcaatgtccttctttccaatttcgatgaaacgaccaaaggtgccaatgcagcgccatgtctggcggagaagagggccggcgagggagttcaacaccacatcgactccctttccgttcgtggcgtgcatgatatgatccacgaaggaatcgtttcgactgctgaatatccgagacggagagatgccgtagtgctcagcgatgaagtctcgcttctcctccgacccaacggtcacaaagatctctgcgccagctgcctgggccagcatgatggccgcttgcccgactccaccggttcccgaatggatgagaacagtctctccgggcttcagatgagccaaatcgtaaagggcatggtaagcggtaataaatacaagcggaactgaagcagccgtggggaaatccatacccacggggataggcgcaacgctggtgtatgggatgcgcacacgggtggcaaagtacccgatgataaaggcgtatacataatccccttccctgaaaccggccgcgcgagcttgaggagtgacatgggcgatgactccgctacattcaaatcccatccggatttcatccaactgacccagggcaaccatgacatcgcggaaattgagtccaaaggctcgtggctcgatttcgacataaccgtcaggtagcggctcattcgccaaaggatcatggccaaattccaggctgctaaggagacccggagtggtcactccgaggcgaactggatggccgatctcaaagaagggcttgagctccggttctctccgcagagagagaccagagacgagctgggtttcgtgcacgttttcgcaaacacgtgaaatgtggactacattggatcgaacagaatattccgtttccagtttgttatggggcgaaagataaaagccgacgtgtaggatacgtgcgaccacatcggccgagtgtgcactccatgccgcagattccggagccaggtccaaggagacatagcgcttggcagtgttctcacatcggagggtccgtaacaaaccctgatggagagcaccccacggctcctccgtaatcgcttgggccccccgagatacccataaggagccctgggagaagcccaacaaatggcgcagggcgttgaactgatcctgagtgagattatggagaagagggctaaccagatcatcgaggaagacacaaacaccactctcaacgttgaccgcctcttccaaggagtgaaccgacaaactgtaggaaccgtgttgatgaagggtggccctgagggactgtacccagctctccggcggtgcagctgtggagtacaccaacatgatctggcgtgatgatggcagttccttcgccacctccggtggaagaattgaagccaaaattacttcacctcgatatgattcggcatcgaggccctgtacaacctgaagggcgcaggggtccaatccagctcgctcgagtgggcccttccacgattcgagggaggcgactcccttccattgcggcatcagcctcaggataacctggattgcagaatcctgaatgctgtgtccaaatatcagacatttgcctcccggcttgagcaaggttcgaacattcttgagaatctgttcaacgtccccagtgatacacagcgcagaggatagaatgattaaatcgtatgtctcaggactaaagccttgatcctctggaaactcgctaggggtgtaggtcttgaagtgaactcgcccatcataatccttcaatgcatcctcatctgttgtagcccgtgcctcttgcagctccagagtcgccatatcgtagtcactgaaacctcggtccgtgcctgctgtcaatgcatctagtatcatacgggtcgtctggaaactgccattgctgatttcaagaatcttggactggggtgacttgtagctgtacagacctagcaggtcctggacaacagagacgcaaaagtcagctggctgagatgaagacctttccagaagttcgaagtgacaatgctcagccacgattcgagcgtccgtttgtccagaaaggatatcaggtaatgctcgagcaaatcgggtgagaagccttccttcctcgacctcttccaggtccgacgccagcgccaggacgtattccgcgctcatgccatcgaggtctagtgtgggccgagcctcgtcgacgacgctcttcatccaagtccaataagcttgattgtctgccgtgacagtctcttctttaatctcgcggagcactgcagaaagaaagacaacggccatctcctggagtcgcgagaatttgagctgtttggcaccgagattagaagcttgggagggacgcagatcggcggcagtgacaaagtccacgtctggtttccagatagcctggtaacagaggttgtcatgcggctcatcaatcgtagctgtcccgcccagtgaccgaaagaataatccctcgatcctcagtaccggctcccgatggggaccgggggtggttgcatcgacgagccggacagaggactcaaatccgtgaggaccggaccggatgagggacgaatgagactcaaaaatgtgtccaggctctgcactcaacgaagacgcaatgtacaatgacttgatagcggtcggaatcagggccgttcgttggtccgttcctccggagggtaggttatggtataccccctggaaaaccgagtccagggtggtcggttgtatgagatggggttgttgatggcggtgcggcatggagtcagccgtatcagccactttgaatgttgagatagagtgcccaggcatcgattgcgcagcgatcaagttctgaaatatcgggccgtgattcacgcctacggcgtgcaatgccttgtatgtatccgccggatcaattgttctccagttcccttgctctgcttgattatcaatccccgaatcgacgaaagccgggccaacccatccacttccgttatgtggtgcgatagttgcacactgaccctcacagtgaatagtccacttgccctgagtatcaaccgactggatctggaagtcataccagccctggacccgaaggactccgtcggccgtggggcgcatggatgtgcgaacctcgactccggcggccgatgtatcgtcgaggatgagcggattgcggatctgaacatcctgcagctggtaccccgatggagttagcgagaattcaccgccaccaagttgacgcagaccctccacgaccatactgatgtagcccgctccgggataaataatggacccctggacgacgtgatctcgcacccagggaacgtcccgaggacgaatgacatagcgccagctgggtgttgaaggggtggaatcggcggcggcaacgcccaatagatcgtggggtgcgaaagtccttgtccgcaggtcacggttcatgcgtggttcagtccagtaggacgtctcgtgattccatggatatgtcggcagatcggtgagcatcggtattccctggtggctgtaagggaaattgaccgccccgagatccaccggatagccttgtttgactaacgacgagaccagacggtgcatggtctgcacggcattctccccccttgtcaagcacgactcgtaagcgattcccgctggctgtagctctgggagctgaagggtctgtcggactggaccggccagagcgccgtgcggcccgacttcgatgagcagatcaaccgcgggcgtgccatcagtctccgccggattaacacagaggttgcgaagggcgtcgagaaactccacaggctgtaccatgtttcgtacccagtgctctggactcgcgatttcttctccggagtacatacgatcgcctgtcgtcggggatgagtaggtaattcccccgtcataaccgggttctggctgcaagaaccgggacaacatttccctatagtcgtcggcaatgggcagcatatggtgagagtgataagccgcttcgacctttaggcggcgagcaaacacctgctcttgcgctagaattgcctctatctcctcaatagcgatcatatcgcccgagatagtcacgctggatgggctgttgacgcacgcaatgacggctttcccagattgaacccgggagagcacggcttgggcattctcgcgacccagaccgacggccaccatcccgcctgcacggtcgagcagcctttgaaactgactggtcagatcgccccggctgtagacgatggccatggcggccgacaggctgatagccccggcggcatatgcagcgccaacctctccgctcgaatggccggtgactccggtggggtgaatgccccaggatcggaggagattgactagggcgatttggaccgcgaccgacagcggcaggctatgggagacttgattgacgcggctctcgttggcatcgcgctgcaactcctcgaccaccgaccagcttgctcccatagagcggaggcattcatccacctccccgatagtctgccaaaagacaggataggcgcttaagagctcccgtcccatggcgtgccactgggcaccttggccagtgaaaatcattcccagccggggagcccgcgaactgcgatggggagacagctgtgtggagtcaagcgtcgactgcagggcggccagcgagtctgcttggcaggccactgtccatgcaaaccgggaccgtcgttgccctagtgtaagtgccagttgatccatgagatggtcatttttcgactcggatcgttctcctgcctctgaaacatattgtcgcagttggtcgaccatggtccgggtcgtctgttggtctttggcgctgagcacgaacactcgagaccgggccttgggattcggggagcatagctctgtcgacggggccaagagaggaaggagatattgtgggtgttcgaggatagcgtgtgcattggcgcctccatagccgaagttattgatcgacgctcgacgtagcgagtgtgagggccatgactgcaggctgagcgggatctatccaaggtatgggatcagtgattggtatccataggcgccacgagtcaaaatggattgctttggcctacctttagtttcaaagtctccagcgagatcttctcgttgggggactcatagttcaaatgcggtgggattttccccttctctaatgccatgaccgccttgataatacctgcaagaccacttgccgcttccgtatggccaatgttcgtcttgaccgatccgatcagaagcgggtgttccccgggtcggccattgccaaagaccgtgcccagtgcatgcgcttcaatggtgtctccagcctgggtcccggtcccgtgggcctcgacataggccgtatcaacggggtttagagccgccacttcatagcattcccgcatgagcgtctgctgtgcctcctggctcggtgacgtcagggtggccgttttcccatcctggttagcggcggtattgcggatcaccgcgcgaatgggatcgccgtcgcggagggccgtctccaggggcttaattaggatggtggccacgccgtccccgcgaccataccccgatgcccgggagtcaaaagcaaagcactttccttccgcggagagaagactaattcttgtcagaaatttctctcttacgttccctccctgttcaagtctgaacgtacctgaggttggttccggaaataaacatatccgggttcaggagaacattcgatccccctacgatggccatgttgctctcgttagctcgcaggctctggcaggctagatgaagtagggtgagagtggtggagcagccggtgtcgatcatgagactggggcctcgtagatcatagaaatgggatacccggtttgcaatcatggccgccccattccctgtcaaatagaagcgcgcaagggtgtctgggtctcgcattaagctgtcgtgattatctcgaaagcaggtccctgcaaacacggccgttcgcgagcccgccacctgttcgaggggaatgccggcattctccaacgcctcgtataccgtttccagttgcattctgacctccgggtccattgcctggtctcgtcagtttgcaagaaaaatgtcagggtggaatggtgcccttacactagccgtttcggaagagaggttgaaaaacgacgcatcaaattgggaggcatcttgggttagaaagtgtgctcctttcacgtacgactatagaaaaaccaaaacagacactcgttagaccacttattgaacccggaatggatatagatggaggtggaaagatgaaataccgtcccgaggtgctccttgtctggatgataccaggccgcctggttgaagcgattcgaaggaatgggggaccaggcactgcgggcgttggcacaaagttcccacagcttttcggggctggtggcatccccaggaaagcggcaggccatgccaatgacggcaatgggcatgacgggcaggtcaagctctggtgcgagggagtgatccgtatcgccatcgctgggactaggagttggagacactgggataatcattgggcgaaccgctggatcgatgagctgtcaaaatggcgatattggttaaatcgctgacctttgcgcacagatccgttcattttaacgttattattataggttgtctcgctggcgagctttccttattgtcagtatacgctgtgtggctctccatcttcggatcggacattgtcatcttgttcggtcggagtcggagaagacaaagaaacagacattggagggttgagggtctggatggatccattaacgctaagcagggactgttgtctcaaacgacaaagaagaggcgtcggaatgactccgttcggtctagggggaagagaggcttactggctagcctatccgggtatgggttcggtgttaccccaatgtttgaattgattaataaattgataaatggcctgtcatccatttagtaagattgggggtcgttattctgtgctctccctcattcttccctgctctaatacctaccgagtatatatttcccttccagacggccttctcttgcgaaatacctcgcgatggccttcaacgcccagaataccactaaccaaggcgatatctcgcaagatgccatcctcgaccacccccccgaggacagtatctccgaactggcctggtcgcctatcgccaaccatctcgccgtatcgtcctgggaccataatgtacggatttacgatgtgacgcgctcggttaagggcgaaggcaaggcgatgttctccttcggcgggcccgtcctgagttgtgcctggtcgcccgacggctccaaggttgtgggcgcgggggccgacgggtcggcgcgtctcgtagatctagcaagcggcaaccccactacagctcaggcccagcaggtggcgcaacatgatgcccccgtgcgcagcgtgcgcatggtccaaattcccaacagtcaggtgccgatcgtcgtcaccgggtcgtgggatcgcaccgtcaagtactgggacctacgccagtccaccccgcttggcgtcctggaatgttccgagcgagtgtatgccatggagatctgccagggccaattgctggtcgccttggccgatcgccagatcagcctcgtcaatctcaaccagcccacttccgtcttcaaaaccctacagagtccgttgaagcatcagacgaggaccatctgctggatccccgacgggtccggctttgcggtcggcagcattgaaggccgatgcggcgtcaactatattgacgacgccaaaaagcagtgagtagctaacccgcacccatataatatccccgatagattaatttccagggagaaagaattgccctgatggagatgtgacccgcagatcaaactttaccttccgatgtcaacgcacccccaaagacaacgaccccaagaaccaactggtttattcggtcaatgcagtatccttccatccgcgctaccacaccttcagcactgccggctccgatggcacctactgtttctgggacaaagacgcccaccatcggctcaagtcgttccctgccgtcggacacagcatcacctctaccgcctttaacctcgacggcagtatcttcgcctatgcgatcggctatgactggagtaaaggctacgcctacaacacgcgcgattatccgactaagatcgccttgcacccggtgtccgacgccgaatgtaagccgaaggcgaccatgaccactcggaggtgacaatcggggtcggaagatagctggataacacaatgtcagaaataatgttccgatgtgttacaacactgcgaaggggcagaacggccaaatgtcaaatgcctgaccaggttcgtggtctgaatatgcctgaatatagactggcagaaatcaaaatacctgaagttatcatgacaacgggcttgataaacaaagcatctaatgttggaagttggaacttagttcaaaaaatgaagttattcctaccatacaaatttccgtatacacccgttttgtacggtcggagatttatggcgtttcaatttatagtacacggtaactatagagcggtgtcgaaagcggtctataattcgggcaaattcaggtataaaccctgaaaaatcgggcagggggcagttcacccaacctgtagcccacccaaggcacgtgactggtaacctatcttatctccaccggttgggtcaacttctataatttggttttaaacctcaccaatacctcaccaataccaactttccaccaatcatttctcgtcaatacctctcatcaaccaccgaggcgaatcagggagaaataacacattaattgcggagcgaagcgaagcaattaaatcataacctcgtgtgcatgtcacgtgaacgttcttttctcctatgggctccaaaatcattagaatcaatgtggtgaagtagtcggctagctttagcagaataatccaaccaatgagctttttttctcatcaaaatgcatgtttttttactatgtaaatcaagattccaaagtgcagaattaagtccggcaaaattaaatcgatgcttgattagtaagattgaatcccgaaaaatcagagaggggggtgtcggattatccaaggagggtgaacaatcccctatttttattagtggtttacatacaaattgtaggtacctactgccggtggagatctcatgtgattccggcgggtcaccggttggaccaaaaaatggcacacaggttgggtgaactatcgtctcgagtgagagctcccaactagaacattggtccattgtctaccgaaaaatggccattttgtctacccgcgccagataaattggcttcaagacgacataagccatacccttcaatactttcgttgatcgaatcctaaaaggtttcttccattctctgtttcgagaggctggcaccggtattttctgatctcgcaacgcacactcttctcgttgcctgctttgcgccgaaagctttctgacgccctgaaccataccccataaataaacaaaaagagcgataaagaagacatcacgttccagcggtaataacgacacgaatctgcatcacagtattgtcgacaaacgaaagtaaatagaaagacagatacgaaaatacaaagcgtaaacctccacggcgcgggttagcagctagtacccgagggttagaaaatgtgtcctataggattggatgtctgtagaacccaaggggttccaatgtgtacgggcgactaagtgtgtgtgcgccccagagggtggtctgatgtgtgctttttctgattcaatccgggggagggaccggaagagattttcacttctatgataaacttcgcaaaattgcgaagagagaaaaggagagttgaaaaatcagaggagaaaggagtgggtggatcttctgccgtcccgagtaactttcgtcggcccgaggccgtcggcccggagcggccggccttggcaatgcttgggcaaactctccagccaactttggactccagatcagtttatactgagctccacttaatttgccaagtctgggcgaaagaatcggcgggccattttgccaaattccaggcatcaaggccccaatctactgaaaacgaccctacgctatgccccttcgtacctggggggtcccagactagtataaggtaaattttttgactagaatgtgaagctcactgctgaaattaacggccagctcaacgtttgagaactttcttggagatgccatacgatgtatcagtcagaatgctctagcgtttaaactcgtgaatagatccgtatcaatagctgcatacaaaaatcaatagaaacaatctctctaccccgattaccacgtcagcaacatagctacccccttagacacccaagaaccttgccgcgtcagccctcccgatgtaagtcgtggacgtgccaccaaccgtgggaacaccactttgacgtcaggtctatccatctgaccaagatactcgaccaacagtgcactgaggcctgcctgctgggcctccttcaaccactcccccatgggtaatgcccgatacgatgcacccgtacccttctccaagtatcgttgtattccatgtagtgggatctgctccccaagatggtgaaggtaccgtacctgattcaagggagagggatcccgaggtgccagaatctcgcgtacaatatcccgagccacctgttccacaggcacaaagtcgagatagccctgccacgaggacttcgcggggagaggaaccgcacgtagtttcctagagaactcgaggagattgtccatcaagtccaagggggatgatccctcgccagtgacgctggaagggcgatgtatccagacggggaagtccgctttccggttcgcctcttcgagcacgcgctcgctggcccacttggaactcaagtatccctgggatccatcggtcggaggtaggacgctggcagcggagacctctgcgaaagtcgaggattgggtgaaattggcgacgccgctggtggaaacgtagtggactggcacctggcgcggccacgccagctggagcaactcgatggtcgaatccacgttggctcgacgaagggccggataattcttgaggaagctgacatcggctccgttgtggatcaccgcgtcagcatcattgaagatcgcggtggcttgggcttctacaagtcccaacctcggcagcgtaagatccccgtagtgcacaataatcttgcctgcggtgaccagaggagggcgccgagtgctcgtaacccggacggcaatgcagtgaacggtggctacggccgggtcttccaccagccgctggaggagagctcgcccgataaatccagtggcaccggtgagcacaatgcagagccctttcagattctctaatcgagttgtaggggccatcggtgttgacagctgaagctggtcgggaagctgaatttcctgctcccaaatgatgggcgctgctgccgttgtagcaacgggaccagcggcaattttcgccgcatcggtcgacgggtcgaggaggagagccatcttctgcaccgtggtcgctccgaatagctgcactagcggaatttccgtgcggaactccactttgatctgccgctgcaactccacgagcagcatggagttgcctccaaccgcgaaaaagtcggactcgggctctagtccatggatggcgataacatccttcgagatgaccgaccgccaaagctcgacaagccgggcttctgttcccgtgagctgcgaggtgagacccaccgattctgcctcggtctgcggaaggcttcgagtgctcaaggccttgcggtcaagcttgccgtgggctgtgactggcatgtcatccacggggagcaccatggacggccacatgtaacgaggcagaggcagagatttgctaagttcccgcaaggattgcttgcgttgctccacaggatatccggcaaggaaaatcacataagcgaccagcagttccgtgttggtattggagcctgtatagagagtgacgacggcctccttaagcatcccttgcgatgattgaaggatcaccgtttcgatatcgcgcaagtcgacgcggtagccgcgcaacttcacctgggtgtccccgttaatccgaccctcgatttgaagttgtccgtctggccggattcgcccgcgatcgccggtgaggtgaacccgtcgccatccttgagccttttgttcggccgtggcgaatcggtcctccatgaagcgactgcgtgatagatcctcgttgttcaagtacccatgcgcgatcccaggaccaccaataagtatctggcctggaataccaacgggaacggggttgagcgcttcgtcgactatgtagatggagtaattcggggccgtgtatccggcgacgaccgacccacggtgcatccactcctgtggactctgggttttgctgcggaggtacggcacttgcagtttgttggaagacatgctggcttcggttgggccgtacccgttgaaaagtcgaagatcccgcttgttcaactcttggaaatcatgaatcatgctcgaagtcatcggctcccctgcactgaccgcagtcctccatttggacttcttgagacccgacaaatcaccgtgcataaaccaactgtgatattcggaaggagtggcccctgcgacggtgataccctccgtaagaatcgattccaccaaggccaccggatcaccacgtttagacagcggggcaatgaaaagcgaagcggcgtttgccaacgccatgaacacctgccataccgaaaagtcaaagctgaaagcaatttgctgcagcaggtgatcgtgcggccagagtcggaactcctcctggtttccttcgacgttgacgcgcaggttctcgtgggtcaatgcaatgcctttgggagcaccagtcgaaccgctagtataaaatatcacggctggatcttccaagacggcacgattgacgacagggatagggaaggacattggtaaatcgtagatgttcattgacagtgcgttcgaacaccccaattcgtccacttgatctttcgtctcattgtccacgagaaggaccataggcttacagtcatcacagatcgatttgagacgtggaatttcgagccgaagatcgagcggaacataagtagctcccactcgcagaatggccagcatagaacagatccagtcggccgttggatgctgaaacacacccacacgttggccacggctgacgttggcgcctaacagagcgaacgcaattgagtcgattcgttgactcatttcctcaaaagtgaatcggttgttgaggccgtctttcaaagcaagtttcttggggaaccgttgcaccatcgtgtcaatacgatgggggagcgttgctggccatcggctgggcactgtcgggcctgtgtaatacaaagacatcgttaatagtggcgagatcaggcttgggggtgcgtgcttaccttggctgagtgcaagggacctttgaacatcctttacagcgaatatagacgcctggcccacgggggtagatggatcattggcaaagactgcgaccatgtttagaaaggcgttcagaagagtctcagctgcttcggtactgtatagggattgctggaggccaagaatgaccaatggctcgccttccactttgtcgacaatatccaaagcaacatcgtaggatgttcgacccatttcataatctagaccttcgaatagacattctccgaactgccgtttctcgcggacatcctgccgataatccatgaaaacttggaacaacgggttatgggatggcgatctcggaaccttgagttcggatagcagaatatcgaatggcacctgtgagtgagctaaagaactgtagaccttcttacgagctgatcgagttaactcaacgaaaggcgtgttggcatcatagtgcaaaggtagggcgagcagattcaagtatggccccacgctgtcagctgcttctacctgaatacggttggcatcagccatgccgatgcagatatcctgggtctcagcgagtcgacagagcagtgcctggaatgctgcaagatagaaatgcgaaggcgtgcatttgacagattggcaaaactggcggatttgtcttcctagacttgggttcaggcgttgttgcactcggtgatgaccatatcgtaacagagcttggcggtcagatacacacgcgaaaggcagtaatggaaagtccgctgggggttcgggaaatctctctctccagaaggccaagtcttcattccacgagccgttatttcgctgctgacgttgtttggccgcgtaatcggggtactgaagtactcgcgtactgagagaacgtccttcgtaggtgttttgcagttcagagagaatcacctccaggctaacaccatccatgttgatatggtggtatccaattatcaggaagtgcaccaggggtgttgccaacaccgcagggcacaacagaagcaccctcattagctgtccatgctcaaggtcgtagatgtgattcttaacctctcgcatagtagcctcaacttcagacattgtgtgataagtcttcctttccagagacaacgttgagtgtggcaggatgatttgcgtaggtgattctccatcctccgcagaaaagcatgttcttagggcttcatgtcgttggcccaccccttgaactgctcgctcaagggcatcaactgaaaaggcgccctggattcgtaatgaacaagtgatattaaaggtagtctgatcctcaaggtataagcggaggaaccagaaacgagattgtgcaaaggagagtggctccttccgtaacgccgagtggacactgtcgcccggctgcttcaggagattggcctggctcgggttatccggaagcggcaaattatgctcatcttcactgaatgaaggcgtttcgatgatgctgaaggacccggatgaagtgtcctcgcctcgggatatatcaacgagactggaggtggtgcttgcccgcgtagatgaactttggccattcgaaagagactttgaggagacagtccgtccaggtccaccgggtcttggccgagcaacagggtccgcagaactagccaacttgggaatactgccaagcttccgttccgaagtccgggattgaatctcagattgctgtctaacaacagcctcaccaacccgcggcacaggagcagctccaatgtttggggtcatctcggtaggaagcctatctaaggcgaagtggagaatgtcgtcaatggtggcacctcccaaaatgcgtagtaccgggatgtcaactttcagttccttcaagaaccaggatctgatttcgacagtgttcaatgaatcgattccaagctcatctgcagctttatcgaggatagaactgctggccacatcatgcaaacccagcataatctggagcttagcaaagaaagattctgccaccaagtcagtatctcgatggtatcccagagtggattcgaacataccttgaacaatcttggagatctcatcagctgttcttgcctcaagaagctgtagtcgaagcggcatctgcctcttggagtcgccatcggtttctgtggacaactcgtcgagaacgactagatgctggaatttcgggctgtatgaccataacggacgctgctcatcaacatctctgataatacgcagcccacatgtgagctccaccgtggcgttggaactaggagacccagcgaggatagcctctgcgaatattgtatggaagtcgccttctgacatccacacatgaccactcttcagaagatttctttgcagcgcctcgctcgtttcacgagtgacatagccgactcccatgatcgctccaatatttatgacagaacctgctagcccgcgctgtttgcggttcgctgctagtgcggtcatgaacatattggcagcggcgtagttggactggccgatattacctgtgacgcaagttgcagaggagaagaaaatcatgaagtctagaggatggatgtgggagaacaactcatccagatgaatgctgccggtcaccttcggtttcaacaccttttgcatagcttcgatgtccatgtccttaaccatggtgtcttgcagcaccatcgctccctgagccactccagcaattgggggaagattccgacagatgcggtcatatactgaccgcagactctctcggtccgtcacgtcgctgtgatctattagcttcgatttccttcgagaagccacgtttcttgctccatagagatagacttacccggcatatacttcaactctagctccagaggttctgagctcctggagaattgtaggatcgatgttggggtttcggctagtcagtaccacgttcatggcgccttgccaaatcaaccattgacaaagggacaaacccagggatcccgtcagaccgacaagccagtatgtcctgtcattgcgcaaaaagggataatggtcaaccctgcgaatcagggaagaaaccgttgaagtggatgtccagtcgatgaaggagaatgcagattggttcagagataggctactgatatcctggagtgggatgaagacctgctctgcttgtctcatggtagcggcatcatggtgtctctccgtggctatcatctgtatagtctcagtagggatgtgctcctctgaacttcgcacggtatcgctgcagaaattagcgagccgctcaaaggtagacgacgagtgcaatgccgagcgaagcttcaacgtcaggctgctgccctcagcgccgggtcgcatgtccaggaccatcaccggctcgttgggcagtaactgttgcaatgatcgtacgtgagtgtgcggatgcacaacaatccaggatggctgcatgtgattcccatctgaggtcaagaagataatgcgtaagcctctctgagaggcatggaatgctagtgccgatgaaacgaccttctcaggctcaatcacgatcagtgctgtatggctgtgggcagacgatacaatggagcgcgcaacagcatgggcggccgcgaacggtagcaacttcgtgggggagtcgtcgctaggaatggtccagctgctgggaatgtcgaccactgaagagttccttgcagcaaaaccaaagactttctcacccgttgcaacaactgtgccggcgaccaaatatagatcattaccgctaagtagacggaccgcctttagagaagatgcctcgacactaattcttttcgagcctgggggagtagcgggagagtcatactcagagccatgttcaacgacataagcccccgcattcccctttaccgtcacaatcttggagcggaggtcgacctcttccgcaattgctcgcctcgatgcattgtaccgcagattttgggcattattgagtaggatacgtggaatgaactccttatctcggatcacagccaattcttgctcggtgctccagagcagcctatttgctcgctcgggattgtctgatatgttcacaccgataaagcgcaggatagctcgtgcaataattagggcagctccagacgaactcaccgagtccaaatctaggaattgggattgaacatggggcatttcaacggtcattgagcgaccaaagccaaggctctgattttggtgaatattcccagcgcgagaatcctcagtcacccaaagaagataagctgatcgttcgtagatgagcttcagaccagccaacgcctctgcggtcatgttcttgaagacaggctcgtctagatccgaaagattcagcgtaaagtatccggaggaagtgggtgctttgctgagatcttgcagacagtctataaccgatacatgatcgaaacgggatttaagatgataaagaatttccttgcgcacgttatgcactgcatctgaggcgccgccaacgactagaatatccgttttggaatctaggaactcaccgctagattccaggggatcgcggaggaactggacagtgggatcgatcgcttgggagacgatggcagacgccgggaatggaagtgcatccgcatctggtgtaatactatcaatcccagaaaaaccagtcttgcgcagtaaccgatcccattcgtccgtggtcacgcaaggggagagtacccggccatcgtcagcaccgagccaccagccgggaaacgatccaaatatatatcctagacgtgactgctccaggttggtgacctctagcatgaccaaataccccccgggtttcagcaggcgtcggatgttattcagggtgtgttccaatctcgaagtcgcatgcaggacaaaggatgcaacaatgacgtcgtaggattcttcatggaacccttgagaagtaatatccttctctgcgtcgaggactttgaagagcatctggccggaatggctagagaacagttccctggcattctcaaagaacccgttggatatatcagtgaatgtatagctagaaaagctacgaccaacggtgctgatgactttcttcgtcgcactaccggtaccagcacctacaagtaatccattaatttagtaaagtctctcgttgacgatcgtgcgggaatgtacgtaccgatttcaaggattctcatgtggggataacgatgcacaatctgagctactacaccagcaaggtaatcactgaagtagccaattcccatggcttcttcatagtatctactcaggaggttgtcctttgtgagatactccaggatggtggattgaccctcgatgactttcgccatgtgttccccaatgatctgcatcacagcaagatcgacattgtcggggaacctaaaaactccttagcaaaagaaaaatatcgtttagtgaaacatgaccgacctttggctttcacgcataattacggcgtgagtatcatggatccagctccgttgagcgtaacggtgccgatcattctcaaccaagccagaaacatgggatgcaaatcgaagcaggccgaggtagggaccctcgtgacgagcttggtgagtggcgggaaatttaagatggagttggcggagatagaatattgacactctttccaggacataggcgagctcatagtcctcgttggtggctttcccagcaaaggtcaccgactctgtatctggcgatgaagggctccagaccattgagctgaaaaatggccgatcactggcagcgctagcagcttcaagaggcacagcatgtatgccttccatgcgggcaagcgtgtgctgaccatccggagagtagatatcaacatcacccaaggtgtcagaagcctccatttgagttaacacagcatcaagctggaaagcagtctgcacaattgggtcatatgagacacacaagcttggattcacagccacccgccggatcaccttgggaacttgaagacaccacaattgcccatcaccggggaagcttttggcaagcaaaacggcctgaatggacgcatctagcatggccgggtgcaaggtcagagaggctgaatcgggggtaggttctcggttgacaaaacctgtcgcgatacccagtttcctcttcatgtcggttagcgctcggaatgggcccgtatagctgtatccgatagggtccagcgagttgtaaaacctttcactaggaacatcaatcatatcgacaagggatggtcgccgcaccggtagcgcatctggagtgggggtgccgtaggtgattatgagacgtcctgaagcgttcatggtcatggcggtcgactcctgcccgacggcagagtagaaggcgaagttggccagcaccgtgtccttctgtttgtggatgatatttgtgatagaaacaagcgtctccacggatgaactttcattgtcgaagatcatcgcctggcggatgactaggtcctccaactcgaccagccgaatagtctcgttgggcgccatattcttcgctgcttccaccgccgaagatacatagccagccccagggaaaaccatctgtccctgaatctgatggcctgagagccaagggacctcacgggggctcaagaaattccgccagcggaattcttgctccactccatccgggcaccgagagcccaggaggggatggactggagtcgatctactcctggtcgccttccatagccgcgattcgtaccagaatatgcgatcatggtcccaagcgtacgaaggcatgtctttgacaatttgcggttgagacccatccgatagtagcgcatcgtacctacacagatccacactggacggcggcagcgtctgccataggtatcctaggcaaccactcatcgcttcgagatcatgggagcctcgctgcaacgtccctgtgtagtccaaggacgcgtcaagcaagtcttgtattatctgcaaagttgggccacgcagggcaggatgaggtcccacttcaattgctaaagtaaacgggccatggccagcggtggcgctttcaaccgcttgagcaaagaggactgggtggaccatgttatcgctccagtatgtgtctgcaagatcgagcgctcctgcgactgttatgttcccttcccgcacgctggagtaccagacgggggctgagggtggcggatggccgattttgatattcaagtttttcaaggaggaaatatattgatcggagcaggctctcatgtggtgggagtgataggccttgtccacggccaatatgcgaacgaactttttctcttcatcaaaaacggctttggcttgctcaattgcttcggcatcaccggacagtgtgacactggccgaggaattgactgcggccaccgaaatccgtccgtggaactcaggctccttgcagagctcaagagcatcttcaagggaggttccgacggccatcatggctcctttctgtccatcggggcctcgagccgaccgagagcacaacccacgatagtaggctatacagatggcatcgtctgcggagaaaaacccggctgcataggccgcagcaatctccccggaggagtggccaactaccgaatccaaggtgacaccagcaccacgcagcagctgcactaggataatttgcaccgccgtgcacattggctgggagatctcggcctccttgatgcgcgacgccaacgcatcggtcataaactccttcaacaaagtccatctcgggcggtcgttgcttggaagacgttggagagcaagatccaagccctgcacaatctctcggaccttggccgacttcagtaactcgcgtcccatcgtggcccactgggcaccttggcctgtgaagactccgagtactcgagggttctccgtttgagactggtggtgtctcacagcgaggggggctttagcgtctgtttcctcaaggcgggcttgaatgttggccagtaggcgttctgtcgttgcaccagcgacaatcgtggagaaagcgagacgagatctgcgcgagtacagcgtccaggaaacatctcggatattcaccgcggggttttcctggagatattccgcgaacgatgtcaaatttcgggtgagagaggcctcagaagtggcagagaggatgaatggcgtgaagttgacctgatctcgatcccgcgggacgacaggacgctcatatgcctccaagattgcatgcgcattggttcctccaaagccgaaactgtttacactcgcccggcgcggtacacccgacggcagtactggccagggcttcgccgttgtagttatctccaggttggtgtaaaagggttcgatcttggggttgagttgattgaaaagaagattcgggggaatagtgcgattttgaagagctaatgatgccttcaacacaccggctagacctgccgttccttctgtgtggccgaccactgtcttgatagaaccgacgtagagtcgatcattttcttctcctcttgcaggaaaaaaagcattgctaatggcggctgcctccagggggtcgcccgtcggtgtccccgttcctgataatgttcattagccgggatgattcgacagcttatccgtatccttaagagcaaaacttaccatgcgcttcaaagaattggcagcggtcttctttcttttggggatctagtcccacgttggcgtaagtggcacggatcaatgctgtctgtgccgtagagctgggcatagtaatgccattggtgcgaccatcttggttcacgcccgtctccttaataagacactcaatgtgatcgccatcttccaaagcagcactcaaggttttgagcactacaacggcgacaccttctccacgagcatatccatccgccttggcatcccacatacgacttcttccggttggggaaagcatttgaagtttactctccgcaatatacggctctggcactagacagaggtttgacccagcagctacagcaaccctagagcggccggcacgaagtgtttgcacagcttcatggaccgctaccagactagacgaacatgccgtgtcaatcgtcatagacggcccatgccagtcaaagaaataagagatccggttcgagatgatgcttcgagcggttccggtggaagtgtacatggggaaggattcaggatcccggccgatcatatcggcatagtccccccacatcaacccgacatagactgctgtttctgaaccccggaggtcctccagccgcaaaccagcggagtcaaccgattcatagactgtctcgaggagtaggcgatgctgagggtcaatacaattggcttcggcaggcttgattccaaaaaattgcgcgtcaaaaacacggtagtcctcctccagtaggtaggaatggcgaacattgctggtgccatgatgaagattgtctgggtggtagaagccatcaggattgaaacggttgggtggaatttcggtctgtaggtcttttggctcccgtagcagctcccagagctttgacggcgaattgctctgcccagggaatctgcagccactgccaacgatggctatcggctcaggaaggctgcacagtggtggcatggtctcgcaagggcagtgcagtgatgcgggatgtttgagaactggcgatgataaccgtccgacaatgatcttgagaggttttccattattactcctttcatggtgggttttgttgactctatcccagagctatccggcatgtgctcggaggatgtattcggagtgggcccccgagtagtcggtcatttggcgtcggaggtcgcgttaggctgggagttgattcgctaggtggtcgacgatgtggggctaaccgatatacggagtactccgtacggagtagtgtatgcttgaattctcagtccgtatatagtcccaaagaccagagaacactaatctatagctgccatttcgatcaaagcaagaaggggtcgagcaactcccagtttttgtgtatgaacgcatatcaatcaagcccaatggatggcagtatacaacataggaacctagttcaaggggcaaagtagatggaatggaatagcttcaatattacccgcgaccttcgtacacgggcgatttgaacggtcggtataacttcaatgctggatatggtcaaggcctaaaaagtaccgtttgggggtgggaatagcttgaaattcatggatgggtggtattgtgcggtatcgaaggcggtctaaaattggtgagctagtcccaattaagctataaaaccattaaaatctgacatccaaatctcgatataacgacatttgtatgaggagaagagtgaattaacgaactgtgtaataagaagggaaattcgttataggcttttactgtatactgaagagggatattcacgatggacaatctggcctagcagacaagacgagagcgacacaacaacaccaactatccaatgagatcagctagcacatacagaccgtatgtagtagacatccttctatcctaattcaactacatcctgtgaaccccttttcattctgtgtgtggtgcataatctatcttctctccgctgggattttatctgacatgagagctccaagattttctctctgtctgaaaagcaaggccaatagttgatgattccgggtttccccactgcgataactaatttaaacaagaaactgaccgttacaaatatgacatgtttttactttatttcctccattgaaattgtctttcctaaccagtgaaaaaaaactcatggtccaaagacaagcgcagaggtctcaatactccagcgatctggggcgttcggcggcgtccgaggatccttgaaagcgacatggaccgcgcgccctcccttgaccccactgcctggtttcgatccatacgagtcgaagatctgtaacatgatcgcctcgtcagcccctactccggagagatagtaccacttctgatggtctcgatagatgggagcgccaaaatcttccgagaaatccttgagatgggagaccatggtgacaatgtcttcgtccttgacggtggcactcgatgcaatcgcgagcggacaggtgtagacggtgccgtttaggggctgccagaagtgtatcacacggtagcggcccagcagcagcttttcggcctcttcctcgtccaggtgatatctcacgcgatcgaccaccgcatcccccgtatggtccagatgggcaatcaatgcgggcggattataaggcacggggaagttcttcgtgtggcggatcccatggcggaagatgtgcaccttggtggcaccggggacgttggccagaatctgctgttctactagtggatagtagttcttccggatgtcctcctcgttgtcgaaattggtcttggagatggggacgccctgaacaatatggatggaatcgtggtcgagattgacagaggactccttgccgcgcaggtcttgaacagtcaccatgctcggttcgccgcgaatgttggtataagggactccctctggagggggacacttgatgtacatataaggtgtttcatcgggagggaactgccggctaaataaaagcggagtggtgatgtctcctcgagggggtggtggtagagcaccttgattctgcgcggagactgggggtgtcttagtggtagtcatactatggaccgttgcgtctttccaaagatcgttgccagtaccggaagccttgaatagatctgcggggagtgtctggtgagaaatatatggagtatattttccaggatcggctctgctactgctactccacaagcactatttccagcaaacttcctgaactcgtcggagtcggaatggagtcggacagtcggggttgatggccgatctgaaatcatggctgattttctccctcccagttgaatagccagtctaacaattagttagaacgaattttgcaatatctaccgatgactataccatagattagtatactattatgactatcctattaacatattatatagtaacactatcaattattatggaaaaagaacgggggaataatgtatgtatattcacggctaaagatcggttacttcaactaagtcttcagtggctctgctagttacaatgtttcgcttagaaatcttcagccacacgttcggctgtttggtgatatcgtcgaattccgataccagtggcatcttccagtccgcattcgcgatttctaagttgtagcgcattaccattgcggccaccattccaatcatctgcttctcggcaaatacccgccccggacagtaggttgtaccacctccgaacggcttcgtcgtccgggcatggctttcgccttctccgcccaacgacttctccaagaaccggcgcgcgtggaaggactcggcatccgggtgcagggcctcattgaagtgcatgagaccacatgggatgttgataaccccgcctttctgcacgaaccatttcttcttgccggtgaactgggtatcggcgacgacctcacgcaccgtcagtgagttgttgtgcatgcggagggtttcgtgccagatggagcgcagcagcggcatttttgtcggcaggatctccagcagttccgcagggctgcggtcggaagaatattgcgcgtcggcgagttccttgcggacctcgtcggccaggcccggctcagccagaatatggaggagggcgagataccccgtgggcatagagttgaggagcgaggcaaacatggtccgcagcatatcggcgccttggcactgaggactcatcccggactgggtcaggtagaccgtccgctcgtagagatactgcgagacgtccttgcgtgtttcgatattctccactaggtcggcgtaggtgttgatgatgcggtcccgagcctcgtaggcgtcgcggtagaggaaccgcggcgcgcggaagagcaagccccagaagccgtcgcgcaccatggtagtcaagtcgtccagcaggcccggatgtttttgcaaggtggttgcaccgtacagaacctgcacagtggccttgccctggacgtcgaccacggtctttagaccgggccgcgtgatggtcttcttgggcgctgcgtcgatttcggcgtccaggttccgaagctgctcctcgatccgctgcaaatactgcatcgcgataatgtcgttcttgtccgagagcagccactctaggtccatgcgatgccattcaggcttaatattccacatctggtcggcatccgccgctttgaatccccagatggagatgtagataaaccgaacaaagccgcggatgcttaacgtcttgccgttcttatgaattcccgcaatgtccaccgggtcgctgaatatatagtgtctccgaccccccataggtacactaaaagcttggccttcgaccttgcgactaaagcaatgttgtaagtgggtgttcagcggattggtatctccaacgaagtcatgacaatcgacttacttggcccagcggaagaattcccgcttactttttgcaaaccgaaacgcatgcccaaagaatggcatccagtgcggtatcacttctggctcattgggcagttgctttggcgtgaaagctagcttactgagaatgagaagggcgaccacaccggccgctgccagcacagtagggctgagcatggtgaatgaatttgtataaactttggtttctttttttcgtcgattaaaatatgctgccaatcgtgctattattgttttagggtcggaagagagggcaggattcggacacacacttgctcactctcggaggggatatccgaacatctctccgacaccgatgctgtctgtacatatcaccggacgagaaagacagtcaatgaacaaaggaaaggaaagaattgcaacgacggtggacaggcacaatgctgtcccaatttcgtattaatggcttgagggatggtttatatatggagataacgtcctggactacactcggactgctgttggcatccgtaagtatcataatccggttccatagaagcagtggggggtatgatagctgaaagttagagcggcagataattttcgcgttcaacgtggtccgcactgtctatcgactctggtttcatcctctgtcccggtatccagggcccaagttggccgcggcaactcatctgtggtatgcctaccattggatgggaggaagatatccgttcagtattgaagaggctcaccagaaatatggtctggctcctcggattccatcttctaggttgctgaagcagactgactgactgatcattctaggagacgttgttcggatcgctccaaatgagctgtcattcagcacggcacagagtttccaaggtccgatcaaccaacaaggaaatagataatcgagcaatggacttactgacaggagtgaatatcagatatatatggtcatgccacgtcaaaggaccacaacacattcatcaaaggcaccttctacgagcacccccaaccagaaccgggcatcgtggcggagcgtgaccccgaaaagcaccgggaaacccgcaagctattgtcacatggattcagtgcacgggctcttaagacacaggagtccatcatccatgattatacaaacctctttgtatctcagctgaagaagcacggcaccgaaaatgctttgaacatgcgggaagtaagaggaacccccgatttcttgcgctctaccatttcagacagggtctaatcatggatagtggttcaattatttgagttttgatatcattggcgaacttgccttcgcggaaccttttggagctgtcaagtctggtgaggagcagaaatatattcctcttttgcctacctacaatgccaactaacgccactagccaaatcgcatttctggattgataccatccatgatgcaggcatcctggtttgtttgtttgagattgggcgtcgccttccgcttctatggcccgttcttctgttcgctctgccggccaatatcaaaaagaaattcgacctgttcctcgaatactcgcgggatctggtccgtgctcgggtcgcccgcaaagatacggtaacgcgggaggatttctttgctcggctgctggcggacaaatcggagaataaatctgaagagtggttgatggcacaggccaatgtgctagtcattgccggctcggacacgactgccacggccctggccaccatcacgtactatctggctgcgaaccaagacaaactgtggcatctccagcaggagattcgccgcacctttgaagattcgtcctccattaccagcgactcacttcagggtctgccgtatctcaatgctatcatcgaagaaggactgcgcatctgcccgccgacctcctttgggctaccccggattagccccggtgcattggtagacgggcatatggtacccgccggtgtaagttccatctccattccagatctttatatgcgagggattgttctaaccagccgccaaccagacaacggtgtcgactgcgtcctggaccaccgcccaccgcgaggactacttccgcaatgcacgggactttcatccggaacgctggctcgctaccacgcagccactagcagatgtccgattcaaggaagataaccagacggcgtcgcggccattttcgctgggggcacgaggctgtctcggcgtaaacttggcgtacatggaaacccgaatgacgctggccaagctagcatggcattttgatatggacttggtgaatcaatccagcctggattgggagagagacttgagatttgaagggttttggaaattgcccacacccgaggtgcgattcatcccagtggagaggtgagaagcgtctagtttatacaagagcggtgtcgaaagcggtatagattaaggcaccctaaggcatcctcagacatattaaggcatcaaccctcccaaataattcaaattgacccctgagcgctatacaccttcgcataggatggcgactagacagtagttttgaagatcatatatagaacttgtactaggtatagatatgccttgctcatctacatactcacatcccatctccccaaaacttttgctcggaattgatagtaccactcgcagacgatcacatacagtttcggcaccgtcaatgactcgacatccacatgttcaatgaaaaaaacgccctcgtacggctcctcgccgtcctctccccctttgacccgcccaacatacgcactgcctcccgccccgccaccaaggtcgaatgcaaactcctggttacgatactccaaagtgaacgaccacttcttccccactgacggcgagatcagctcgatctcgtaccctaccggatcatgcatacttcccccgtccctcggggctggagcagaccggtagagaatgtggttgtccgtctcggagaccgaattgcgttgcgcagaaaatacattgaccccgtgcttggtcagaaagggcgacggatacgagacgccatttaaccgggaggttggctgccaaaagctcagagagtatggcccagctgtgagtcggacggcttcccattttgtcaggatttctagccatccttttcccgaccaccagcggtcatggccccccaagccggtccatcggaacgcacttccctgaatagtcaggtcaacttcgatcccgccggctggtatgggttcgccccagtggagcattggcgcattccaggtcgatgcgaccttgtccgaaacgagtgcgccattcggatacctggacggggtggtggagtgaatagcaaaggagccggttacttccttagtgtggatgtggactctggcgtgcttggaatcccgcgtcgcctggaagacgtaatactcgtctatggcgctggcccagatcccgaccacctggttctcacagacatgcacgacggaccgggcgaggtaatcgaccgtggagaaggtggtcccgttgtcccagaccacgtcgagcgacactcgaaagttgccggggccaaggaatgcataagatgcatcacggtagatgccaagcagcagcccgctgcgaccggatgccgacgtcccatcaaaggcccattgctcaccggcggtccggttgagagcggagaattttggtgcatcgaacgggtccaatggggaggtggataagaggatggacggattagccgtctcgaatgccgtcagatggctggtttgacatgtagtgggcagatcaagctgttgttcgatcgtttggatatatttcccctcatcgccgacgtttttgaggtcgaattcccgtgccagtaaaaaggcaagaagaagaacgggcaacgtgatggacagaaattccaacctgattctcgccatcctgatggtaatgactatgattctcaatggccggtcaacaggcaatacaaatcataatatcgttgttgacgcccaggtgaggtctagattggtggttttcgctgagccgaatcctcgccgaacgccctcccgaggccgacaatccgagtccgaccttgcgcagatgaacacaaagacgaatgtctacatgtattattatggtaattgtcatgtctgtcatttctcctgatggagagattccgagagtgagagttcgacgttccggtctattccagacacactgcaacaatgactcgtcttcaccaacaccgtctgccgaccggattctcgccagaatgggtctccttgccagcccatcagacggtcatagcacagggcgatcaagggatacccgtcatctgtgatgatgccccaatccctactccagaagcacacatggtgctggtgagaacgggcgcggtgtccatcaacccgtgcgactggaagatgtcatctcgatttcccagtcctggcgctcgcattggctgtgatttttctggagtcgtgctatccatcggccccgacgcagccaagctaaggcccgatcttcaggtgggtgatcgtgtttgtggaggtgtgcatggttccaacccgatcgatctgccatccggtacctttgccgagtacatcgtcgcccatgccgatctactcttaaagcttcctgaacggatctccttcgcgcagggagcggtactcggtgggagtgtctttgcgacgctctggatagcattttatgactccctggggctcacgggcactccggacgcgccgattgaaggcgacgtaccgcccctgctagtgtatggaggtagcacctccaccggtacagccgccttgcagcttcttcgcgcgtatgtatccattccatggggggaagccacaggtttcgacgcgatggactgaccttccgatccagatccggatacaaacccatcacgacatgttccccgcacagctatgccttggtcaaggagtacggcgcagaagaatcgtttgattatcattccgagacctgtgctgtggatatcaaagcctacacaaaaggccgactgcgtcatgttctcgacatcatcacggatgtgccctcgcagctgatctgctacgagacctttggccgcgtcggaggaaaatacacctgcttggagaagccctccgaagagctccatctgcggccgacggtgaaaaaagaaatgattgtaggattggctgctagtggcaaagaaatcgcactagcggatggctacgaacgaccggcgaatcctcgcctccgagccgaaagtgctcatttcttccaatccgtccaacgtctgttggatcaaggacgcttcaagccccatcctgtccggcttctgccaggtcgatttgcgggtattctcgaggggctagaaattctccggtccaaaaagacatccggggaaaagttggtcgtgctcatcaacgattcttatacttaggttggaatatcatcgcaatatatattcttattattatagaaaatttctatgccccacttccgcttataaatccgcaaaatcaaaattcccaagtgttccccagcttgaggttgatcgctctcacaatttgagcgagggactttttcatgtttcccacatcaccaccaccgcccgcctcgggcacatctaacacaatatcaaatagtctccgcgtaaggccgccgtgcatatcgagccggatcgcacacatacactcatcaatttgtctaataagatgcgcgctcgcctggagcaggatccggatctgaagatcccgtcgttgcgcaacatccaacccgtcgatgtggatgctgggcagcgtgggaaggaagttggattccaccatggtggctgtctccgcaatagagtcccgtatcagcgagaagacttcccggtagacgcgcagaaggctgatataacaggtcagcatgagcatggtcaggatcggatccacggtctcggactcgtctgaagaacgcttggacggatgactagacgcggtgggagaagttggagcaggagccggggagccgtcactcgtgttacgcgaactcggcgtcggcgcatgccgatccgtcagggaggccggcgagaggcctcggttagtttctcgtgaaggttggtctgtcccacttcggctgcggggtcgcgagagtttaaactctcggagggtgcggagcagctcttcggagctgttgagcatatgttcaatcagatactggtgtgatccggtctcgctagtattcatggtcgtctgctggcgagtggtagcgaagagaagtgtgccggccacttttccagagtcaagaagagtcaagtcttggagaagacccgcactgatatccgacagtctttcgttccagttctcgttgggctttggggcacagtttatccggccctggttgttggatttacgccggcgcgaacagggtagagagtgataggcgcttactggggggactgcctcctcgcgcaatggcagaggggcgggatcatggctgtccagtccgagagtcgtcgtcgggttgtttctttcttcctgctcgtcattgttctgcgcccaggaagcgtccgcgtcgataaaggcctgggtgaagtctagtaaatccgagcctggaaagcccgagatggcggcatccatcgagatatcgccgtacgtctggtattcggggtcggagattggacgctcggggctggtatctgtgccgagatggggtagctgggagtccgagtcgaggattaagatagggcttggtgatactgtggccattcgatggtcggggccaaagacggatgaactcatgcggttgggcctgttcgaaggtagcgaggcgttggccattgagggtctcgctttggtgatgcggtgggaaaatgttgtcacacagcgggcgccgaccttgaggcaccgacggcaagagtcctcgatgctcgaattgggtgagagacgctcacaacgcagcttctgacctcgacagcggtcacaagcagatcgacgaggctgttcgacttgtggggattcgtggcgggtgctatccatactggacagtctatcaacgatattctgcgtgccagcaaatgtctccctagacgtatctttatttctcgttttcttcagtactttttccctcttttacaactttctctttactccactttaccacggttactgttcgccgcccactatcagcagggcgatttagggtcacctatcggatcgggcttcatgaacactctatgccaaaagaagtatatgaactagctatcttccaggtctagttgcgcgtgagaaaataggccgtgcatctcaaagagccacgctagcatacttactcgtagcgaaatttaacatgctagccagtcacattatactatgaatttctggtgcctccagccccacttaaactacccctcaatgaagctgagacataagctacagatccctataggcgaataagataatagactatagcgggatgcagaggtctactaaaagaacgagtctcatgcggccggaatagcctatggctccgcttcaccgggttagccgcaataccgagcttacttacattcactagtccatacaaaatgagtcataagaccctgtctaactcttagttatccgtgtctctatgttatttgccagtcgttacgagagcggaaggtgtattcgaacggagtaatcagtacaatgagaagaaaagaaaagaaaagaaagaaaaactagcggatggtctcgattgcatgggttttaactttgtgggcgttcttaccaagccatgcagatgagtgcgccagtacggaggatgggaggaatggttccctccaagactgtccagatcgtcatctatcgttatcatttaacaattcaacccgctgcaactgacccactatatataactcgggataatcgtacataccacgtcaacgcagatgtgatagagcaaatcacgttctctattacttagatcagattcggccccatggggcaggtcccactttgttctggatgtcgcccggtatggggccgcgggccggcccctaatattctgccgggaagattggtcagtcaaccattaggaactaattcatatgctgttccgcggccgtaactaactaatgagtatacaacaattttcattttctctaatcatttacttttctacagccgcatttagttcaatttctagcgactttataaatttcaaactaaatgtaaccacaagctgacaggcaagcacggagtaagcaagtacagtggtgttccatgagtatttgaccttgggtacttcggccttgggcccacttcgtaggcccacttttaatattgcccagcagaaacctcggaaattcaatccaatttaatagctggtatgccaaccttcatatttgttggacatggtggtcacctgaacatcagccctgttcgggattgacaaccccatttcggggtttgggtcccgcccacgggtctagaaagggtacttcaagaaatacatacaggatatctcgaccacatcattcaattttaggaaggtaaactaatatcgcgaagttaatctaaaggcagttgggccgtacattcggccgagttactaaagaaggaagtaagcaagtcagtaagcccgggctctaatgaggtacaacaacccaaaaggtttgttgaatgggagaaaagggccaggttagtagactacctacattaggtcctatattttgtgttttttttttaatcgtgaactctgcagttttccgtttatcggatttgtggctttcaccgaatttgaaagaggtgtctgattgaaatatataccgcctcaatgggtggtgattgtaattttatatataactcaattgtgacgatccggtcaacaaaggaaagagcaggacttgatcacagctgctatgtatggaaggaatctttccttcccaaatagaagcaagcgtaagcgattcagatgtccatttgcatgggacgtccgcataagactatacaacaggctgtcctttctctgctctgtactcaacatctcgtctgaatgcaccttacatctctgtaaagtctggcctgtgacatcaatgacaaaacccgcaattttaataagatgcttgtaatagaatatacttcgtttcgggtaacttccgaaccacggagtaatcaccgcctacaggctactccgaacatcccgtgtgtaacattacagcctcttcttctctaacaattgtcattcaattgcacgaacagcccatcgtccttatgacaagtacggagtacataacgcctgatcgccacttattaccgccttcttaaggctaaagttagttacctagttacaatttagtcattctcattcatatttcaccacatgttggggtgggttaaatgaagcctttggcgccataaatttagggacttgttgcatgcctagatttctagtatcgccttcctgatcgggtacttctggtttacatagtatgaattttgattaaaaaaattctatattctacctgattcctataggattcaaccccttggttggtgaaacagttgatacaagatatgacaggagtgacttatttttgttaagggtttacacacaaactgtaggtacctgctgtcttgctactatcacatgcagtttattactgtcagaatctaggataaatactgtcatttttcatccctgatacagttaggtcacatgactgaccaggctggtttttctgcagaaaaaccaactcagatggtttttcgcccgaaaaatatcctttcattttgttttgtttgttttgattactaagttgtccatcagattgtcatgttttaggactattgtcagttttagagagttagagaatttattaagatttttctgccacaaaatacactcgccttaccaccgtttttccgtcaaatacaaaagggtgtacagattaagacgcggcgaggagagcggtaggcagaagcaagtgaggcaggtgctcaacccaattgggaaggcggtactgaaaattcacgcaatgcgagcaacaattccctaattatcatttttccagatggtttactagctctgtctgtcatatatgaacatgaaggaacgccgttgcaggccctcctgataggcggggaggaggggaaattaaaatcgaacaggatacattctacactcccacgaggaaggctcttcccaatcgctgcacatcagctctcaacaacccttgacggtgacattccgccccaaacaagtcttcaatctcagaccgtaaatcgagcatcaagaccttgttgtctaacatccgctccagacagcgaagcactaagcttttgaccacatcaatgattgtggtgggcaaggcatcggtgtcatactcatatcgaattcttaacgcaatcatcggcctgccattcgaagagacatgagaacttcgagccttctgtggaaatttgaactggctttacccccttgacaggaaagggattttcgacgttaccatgtgtccgttggtcgtggaaagtgaccacgcaatcgaataaaggttgttgttgtctttgcctaagaatttgatggcttgggaatggtagtcctaggtgattcagcagcgaagaccagggaatggcatttgccagcgcagactgagatgacgatcgaacttcttcaagagcgttctcagttgtagaatccgctttttctagcagtattctaactggcaaaggctgaagaaacaagccgaccacttccatatcccttgtgttagatcggttcatgtatggagacccgaggagtacatcatgtcggccacagatagtctgaagaacgatacccactactgccaagccaaattgatgcagtgtgattcctttgagggaagaggtagcgagaaggcttttgtataatggaggcggaatcgtctggaacacggattctccgtggtaggatctgcacgatggatcctcagttggagaatctggagcccgaccgtctgtgataggaaggcccttcagataggtactccaaaaggacaatctatcactgccaacgggttggttccagactgtgcagtcgaagtactcgcgcctgacgggctccaattttcgaccgtagtatacagcagcagtttcgcgcaagatcacattgaatgaagtcaagtcacacacaacatgcgaggcgcaaatgacgaactgattttgggaaaccacggcgcggatcgggctttctttgtcaagattgaagggagtgttgatataatgtccgacgtcaactttccgtacgacaggcacgatgattgactcgcctgtgattgaacgaagcgtcttatccccccggcttgtaaacctggaacgcaaaattcgatggcgattaaacactatctggaatgcagaagccagcttttggatgtcaacatcagtcgagagctccgcaaagtaaggtacattgaagctcgttgttgtctctgaatgttggtaacgatgtatccactcgatctctgtcgatgaaggagtttctagaccaagtggctggacttgagcttctggtgatgccagtggtgtgccatgtacctgtgactcgccctgagtctgaataagacgggctagatctcggagcgttgatgcggagataatatctttgacggtaattgggatgttgaaaaggctcttgatgcgagcagctagagcaagttggaggagagaatgaccaccgaggacggcaaaatcatctgcgcttgatatttgcctcttggagtccaacgtcaacaattgtctccagatgcctgcaagtgtctcttctagagaattcaggggctgacttgacttgggaaccagtttgacgtgattgttcgagacaagacccttgatatcaaatttaccatttttggttaggggcagctttgtcatggagtaaacgcttttcggggccgaatgaggtggcagtgccacggccagctggcgtctcagtagctctgtatcgatttctggctcaacccagagcacaacagcgccgttctctgtgactgcgacggctttggagaccgagcacatcgtccgataaaccactgctgggatgtcgtccaagttaatacggtatcctcgaagtttgacctgccgatcatctctactacagcaatgcaggttgccatgctcatccaaaaagccaatgtccccggagcgatacatcatttcttggtcaaagccctcgcaaaatggatcaggtacaatttcttctgtcgtcttcttttcaattccaagatacccgcgggatatctgaaccccggcgatatatatttcaccgatcgtcagcataggttgattattcaaattgatcgatagaatgggccataatacctctgtgggcccataaatattataaagctctctgtccgaagcccatcgttcgaccaacgcatctggcacaggttctccgccgaagtgaatctttgtgatagtcagaaaattgaaatatactataaagttatgatgtgcaaacggataccataccgatttcaagttaggatagtctcgtgggtccagttctccagccagggaaggggtgagtgttgctacatccacatctgacaggtgagagaatttatcgtcctttcctcggggtagtaccaaagtacccccagaacagacggtcgagagaatctcgtggatacagccatcgaatcctggagaaagcatctgaccaattcgtgtgctgggacggcttgtgggtcgagcggacacggaggaatatagggcgacaacgccccgatgcctacacagcactcctatgccaagtcaataattccacgctatgttaaatattcccgaagacgcacctttgggctggccagtggacccagaagtgaaacaaagataagccgtagagctaggctgtggtaacctaggttggaaatccgctggcttgatgtttttgttcagaatatggtctatcgctagtgtgagtggaccatttggccctgtcttttccatttgcgaagtattgggaagcagtagaacctgggcaccgctgcgttcaaggagctgagcacgatattcctcagggtacgatgcgtccaccggacaataaaccgtgttggcttgcattgcggcgagcattccgacaatccagttgctggatcggtctgccaaaactgcaatgactgcaccagcggggacgagcaaagtgataacgcttgtaattttgtccacacgttcagccaattgagtatatgtcaaagccttctctcctgcttgaatggagatttctgaagcattgtgccacgttgaatattggaacagactgctgatagtttgacccgaattgcatgtaaagctggaagtcgagttactgtttccggctgtcaatatcttctcgcgcatgtgcgcggggaatttcaggccgagacactgctgcacagagaaccggctgcgaatcagggagtgtaagatgctatcatagatatctgccatgtcttgcacctgagttagtgagaacatatcggtcctatagaagaggcgaataccctcatctgggtcgatcactaggttgagaggaatgtctgcagtattttggaatgacggatcttggaggcactttacggctgttgttcctctcctcagcccaccatcttgaacagcaactgtggtggagaatgctggtatgtttgatggaacttccgaaacgtgtatgctagccaggccttggatttcacgatgaatctgctgcaaaaacttttcagtagatgaggacctgtcaacccgaacaaggacaggcaacgtttgaatcaacgggcctatcatggtgtctgcccatgagaaaggaagattgcggcctgagaagacacttccgtacacgattgtgtccgaattggtgtaggttgtgagcagcagtatccatgccgcattaaatatggccgctggggtgacattcacagcgcaggcgtattctacgacttttgcccgatctacactctcatatacagaaatctgagcgtggcctggttgacgggggctaagcaaactagcgtttggagatgctatgtcgccgcacgcatcaggtatgagtggctcacgatcactccaatgttcttggatctctgtacgtgtttcacgacgtagctgctccatatcccttgctgcgatagtgaacgggagagagctctcaaagggtctgccttcaagagcagcatccactttctggaaaatcaaggaggctgaaaatccgtcgactaaggcatgatgtacggtccacattactgtgctttggcctctgttgagcccactaccttcgtagtggaaaacagtggaaaaccgcaaaattactgcccaggtcggcacggctgattaattcctggaacgccacgtcgacatcatgttgagatttcaccgttgtttcttcccaagcaaacgaagcttgtggctgcacaatctgcatgggttcctctgttgaccagctgaaagacgtacgaaacatgggctcaactgagacgacagcctcccatgcctttttgacccggtggatatcagctgtagcataatgagaaagttgttgcacatagttcatctggtgattgtccatggtagctaagaggagggccttttgaaggggtgtgatctttgatttcttccggcactgtagactggtctcttgcgtggagacatgagatctctgcccgtcacaccgacctatcaacgcttggatagatggctccaagaggatgtcgcgcacgggaactgtaaacccgtactggcgacataacgaggataccttgatagcagccaaggagttgattccatagctgattgctgattgattgacgtcaatttgatcaattaaaatatccgctacttgagataaagctgtcataacagcttcactcagtgtcgaggtagcagatattggatcctctattgttgagccaatggattccttgatgatagctttcaatgccttgaaatcagtcttgccgttcatcatcggaagagattccaggacgaggatgtggtccgggaccatgtagactggggcattcatcttccacctggctagtagactagttgtgtcgatggtacctgaaccaacaatggagactaggtgaccgttcaagaggagtgagaacgaaaagcttagacgattgttaagctgcagaaccttggcatcaacatcctgtgcgaggttgacgagaaatccacggattggacccccattattaaacatacggtttactccgacaatggcttgatctcgtagagaatctatccttcttccattctctctcttcgctccaagagcaatgtcataattggcatcgaaatttggcttaacagttgggtactatttcaatcacagacgtgagcatcatcaaagcatatcagatttttccctctggagggcctctccatccagaacgtcttaaccaatcttcgaaagaactagctcgtaggtggagttcctcccaggaagagtcttcggctggatcaagagccccgtagcaaatcttgtcctcgggcgctatcgagatccattccatcatttggcgaatatcctccttgaatccaactcctaccgctctggacgccaaatcagcccattcatccatcgagattggggaataaatcgctggctggccagtgacgcgcgtaaaggtggatgcaaattcgcccatccgtaatttcggactgcaaacgacgtaatttttgttctttgttttcgcaatgcctaaagcgaatacctctaagagaaactcttagccttgcacttctcattggccataagtaacttctctccagtatccctttgcaaggcgtgggatatcccaccaagtctcccttggtagaagagactacaaaagattcgatatcacaacttacctgcagcaaaaatacccatatcatgtacaggatcaacccactgaactaattttgtaggcggaatcgggggacaaaaacgaaccaccccatttgctacactagttagaaatattttccacgggaaactctctatcagaactgaccttctcttcgacagtactgcggacgatccaggttggtgaagaagagaccttcgagaatggttggttaaaatccacaggaacgcctggcgtcagcagggagactaaccaggaagaaggcaagtgaccgcaggcaggtcttgctttgcccactgctcaatgataaacttatgatccatgtggaaaagtttgtcaaagcgaccagaagtcgctcgtctcatgtctggcaagctactaaaaacaaagtgctgaatgcggcaaatcttcgcggcggaaatgatattcttcccactttcgagctccagctttaggtcatcctcgttttcgaccgttcttgaattaatctcgttcgtcaccgcaaacacaccgtaagccccagagaaagcgttctgaagactttctatatcgaaaatatctgcggaagtaaggctaagacggtgatcggaggtttgaaaatcattcaaaagacattgagctgaaacggaattgacatccctagtgactgcgcggacatgccacaattctcgcgaatcgtcacttaaaagcgaactcactacgcctttgccttggtgtcctgtagacccaagcacgacgatgatgcggttctgcgtgttggtcatttcgattcaacaggaaagtaagcaaccttgcgtggccgggaggggagatagttctgaatgagaaggaaattaatgagatgaacaggcggctccaggagaattaatatacctagctcttttcccagtttcactctcgatacattacaaattcagggctggctgacttcgtgagcggatgaaccatctttccgtaccggagacttatgcttatgatatccaacgtcagggtgggtatgccccacaaaacggaagttatcagaattaggtatcttttgtatggcccactcatataaaaggtacatatacctaacagacccatacctagaacagctatagtgaaacgaggatgaaacaggatgaccaatcctacagaaaagtgcatgttgttataatattcataataaatagtggaactgcttcccttgtaccttaggaattcgtcttcgtctcccactgtgagccaagagactgctccaagcccttgaagtcgttcaccctgtgctttcctttcgtgggaacgttgacggggacatattccttatggaacaatatagcttcaacagcaatgggaaactcctcgtatgcagaggactggcaatcgtgctcaaggattcacgttggccgtggagtcttcatcaggtccgggttcttttttattgcgtcccaatctggttggtgacatgaatcgtggttctccttgccacctgtttggatcagagtggcttgtttatgcctgtccgaaaatattagtgaccttaaggatgtgtcggatgtatcaacctgatcttttccgcagcctgtaagccgaggggcacgctgttcttccctgcaagctctagagaaattgccaacgcagccgcattctcaatagcctgactagcaccttgtccagccataggaagataggggtgggcagcatctcctaccaagagaactcgccctgcgggagatagccatgtctcaaggggaggcctagtgaggagggggaaattgatcgccttcccgggcggtgtccgcttgattattggggcaatctggtcccagcaaggccagtccttgatctggtcaagcacatcctgaacattagccggagctgtccaggactcgcgagcattgcccttggggtccggatgggtaaagattcacatcacagccttgcccagcttcacagtgcacatggtgaactcgcaccccttgcccgcgaatgctaacgcctggtcagtttttcctgcaccagcaagcaaccagtttgcctcagggtctggggcaatctcgtcggcgtcgaaatatgcccggaatgctgcatattccgaactcacgggcgccggatccttgcccgtcacaaatcctagagctttgctatgcacaccatcgctggcgattacacaatcagccgacaccttctggtcgttgaccaccacgccggccctctagtctgtctcgaagtattctgagactcgcgcactgaactggacttcaatcccaagttctgcgtatgctgataaagaatattcgccaggtcacaccggttcaaaaagaacccatcgccctttcggaacccagatatcgcatttgtcacgatgaaattccccgcatagtcatatatatcgactgctcggacatggctgacctgggcctcgagctgtcggtgaatatgcccatttgtcccccatttggagacaacacgagccgcgttggttccaattccaatgcaatcaccttctttctgattagatgcttttttttaagttttccagattgatatatatcaggattgacataccttgagctcgtggtgaggaggccttttcgataattgtcacctaatgacctttgcgatgacattcaatggctgcagctaatcctccaattcataatccgacaacaataacgtttattccactggatcgaggctcagcaaccgcgtccaggccccgtaccgatgacacagtcatgatgaagtttaatgagcttggaatattcgtggggtagaattagagggcggattttgaatgatttgaatgtgtaatctaagtccatcaaggcacgctaggaacatgcaagggttaacggcttgcatatactgtggtaagtagttacttgcactacgtagtgaacttcattccgattcccaacccgcttctatgtcgtaggcaggttaatcccgcggatatgataagtccacattcaccatagatgttggttgtaaagcatcacaccgccacttttacagtattcttattatggtagactcgtgacaaacggtagcaaactacaataaataaaacgtagcagaccaagtttccatgatgatgcgcaataattcaagctccgtagactgtgacatgtcctcgattcattcgagatgatcgcgataaggcagcatgactaccccctatagtaatgaaccttcggtaggtggctttcaggttgatccctcatttcctgcccagtctctctctcttccctgtacatgctctttaagtatgttatgatcgcgtgatatatactacgtatgagtcacgtggcaatgaccagcatcacgtgataagtattctacgtcaatcacgtgctttaggtattatcacgtaatatactcaaacaaacacaacgcccacgccaagcaaatgaacaaacaaaccgcggcgtagccagtaggccggctgcaggccatctaaggagacgacagtcgacctgacatagcatctcgacaattcttttggcaatgtcaaagtgacaagaatcttggccattgcgtagtttcaggtggtttcagacttgatgaactggcaggatggttgtctcgagggaattttaggatgattgttgaacaaagagagcacatggtgctttggaatcaaaccaaccttcaaacaaaaatactagacaaagggctagccacgcgaattagaaactcggttccaattcattcaaggtaaagtcggtcatgtagcgccataacaaagaggtcaagtccctgcctatcaagagccgcgatgtcaatccctcggcgtattctgggcgatgtaattagctcgagtttatctgcttggtacatcagcattatatcaggttatcttgaatgtgggggccatatagtatagccagtgagatagcaaggtggtggtgttcatgtgaagttgtaaaggcagaaagtcacctgccccgcttctactaatatccctcattagttgaccaagccatggatgattcaaagccagttgatcagatattcactaaagcactaccgaagattgaggtatgattgatgcctcgttcccctcttagatttttctgactcgatcacactacagctgcacgctcatctcagcgggagcatcagtcgccaatgcctgcatgaaatttggaaacgcaaaaaagagcacaatcccaatctaaatgtagaggatccgctggtactgatgcctccgggcaaggtcgattatacactggaaacgtaggtgtctgtgtccacaccgaacgatgctgcaaataattattttccatgctaaccaaggctcaggttcttctccacattctccaagttgacctaccaactctgcaacgacctagaaagcttggtatatgctactaattcggtcctggaggactttcttggagatggagtagtgtatcttgagctacgaaccataccaagagcatctcctggtatcactcgagagcaatacatcagctcagttctagctacaatcgagacattccaaagtaaaacacaacggatgtctgtgtttttaattctagccatcgatcgcggcagcatgacggcagcagaggcggatgagatcgtcaatcttgccatcgaaaacaagtcgcgcggtcttgtgggggtggatatatgcggcaacccaaccaaaggcgatgtcagcatctacaaagaatcaatttcgaacgcaaaagccaacggtctaggaatcaccattcattttgctgagacagcagcttcggcttctgcgagcgagctatcaacccttctttcattccaacccgaccgattaggccatgtcatccatgtgcctgacgaggtcaagaaggagattgcgcggcgcaggctctgtctggaactgtgtatctcttgtaatgtccatgcaaagatggttaacgggggtttcttggatcaccatttcggttattggcgacacgaagactgccctatcgcactctgcgtaagttcttcccactgagatagagttctatttcctctctgactatctatttgcacagaccgacgatgtgggatttttctgtagccccgtctcgaacgagtacttgttggccgcacagcatttcggcttgagtcgtgctgatctcttggaaatgtgcatcaagtctgcaaatgcaatttttgctggcaagtaccacaaagagagaatccaaagtatgctggaaggattcgctactcggtttgactctgcatgagtggttggaactgtatcggcttgttggatgtcgcttttgttattaccagaaaaagatgtctattgattatacgtagaaaacccgtttccaaattcagccgatttttcctactgagaagaatatcgtggagccaactaaatcatgttattctcaacttcagctacgtatgttgaccagttgtggaagctatacccgattaggcatccgatctcagcctcaaatcgttcagcttccatcgctaacctcaattcgttgcccgcctcgtaccgcctccttttcttttcaccttggtgtcataacatttacttaattctttcggacattatactgtttgcagcgtggattcaatctgcctttgctatttaatcccctccgacccccagcatctccacctcgttttatcagctccagttgcaaattcaaaatatctcaacttttttcctcaaaacgtggacgctcctctcacatcactcaaagctttaacataatgacgacaaatggtgctctcccacagacactcaagtctatcactgccacgaaaatcaatgaactctccaagcaacgcgccttatttgatcggcgcaaagccagaatccttgaagttgccaacgaagccccagatctacgcacccgtgctcaggccttgctgtatggactcacacgcctgaaaggataccccaaggatttgcttgacgaacatgacctggatctagatgccgatccctcacctgaggaatcggaagataaagtcattatttggcgagtaggtcgtttgcagccgggagatcatacgagcatacatcgctttcttctccaaagtcgctacgatccttccatctccccggcagctatacaggatcgtgtcgatcaacttgaaaaggagttgcaatacctcgagaaaaagcatgagcacagtgcattttacagcaatttggttactgagtggctgtcggacttggatggaagcatcatttccaaatccacgagctcgggctcgagctccgacaacattgcgcgggcggaaatgcctgagcaacgcgcgacttgggagtccttgacttttactgctgcgacacatgtcaatgaagatgcaattcggtcctatcttgatgatcttttcacacaaaccaacctttctcgacaggcactcatggatctccgagcaagtatccagtcgtttgggacagaattatcctcaaagaataactggttcaatgtagaggaactcaagtgggtctctcgcgcacttctcaagtccgaccttcttagcgatgagaagacatccattctgaaagagttcatgcggaacaacgaggttgcccaggaagtggcagatgtgctcaacatgcgcatttcctcgcttgacagctggacctggagcggagccgcagatggtgtttctgttgagatgcgccgccagctgaatggtaaatatcgatttttcatggacgaagaccttcttgatgcccttctgctacagtacctcgggacaaagtgggctgtgaagctgcgaactgtatttgagacattcctacactcgaacgcctggaagcccttaaatgaggatatcccagacgatcacaaggagatgcgaaagtacttccttggtcgagacgccaacttgggtgctgtcaatctcaacgagattcgaaggatgacatacgccgaccaatatttcatgagccaactacccacatcaaccgccgaaggcgctcgggagtatgatgacaccacgaattccagtccagaaaaccccatggataaaaagcactcccttttgcaccttctgatcacagaatccatcatccataagcgtcagcgcggggactttactgcaatccgatcggactttgagtggtttggcccttcaattccccatgccaccatgctcaccgtgctggagttctttggggtctctgagctgtggatcaagttctttgttgtgttcctagaggccccgctgaagtttgcccaagatggagccgagggctctgttcaaatccgcaagcgtggcgttccaatgagtcatacactgagtgattgcttcggagaatctgttctcttttgtatggactacgcagtcaatcaagctacagacggtgcctttctgtaccggctccatgatgacttctggttctggggggcagagaatacttgcgtcaaggcatggggggcaatggaccagttcactcaggtgatggggttgaagttcaatcaggagaagacgggaactgtgcagatgggcctgaataaaactccaaaagattcagctcttcccaccggtgatatccgctggggcttcctggttttggatgcggagaaagagagatttataatcgatcaaacccaggtcgaccagcacatcgaagagcttttacgacagctttcggcctgcaaaagtgtgttcgcttgggtccaggcatggaacagctacttcggccgcttctttaccaacaactttgcaaagccagccacttgctttggtcgggaccatatcgacatggccatttccaccctgagccgcatcgagcgcacactcttcaacaaaatctcagatgataaaagctcgtcgaatcaaatcagtggtgtcactgactatctacgcactgtgatcgcagatcggttcgatatccatgatcttccagatggattcttctattatcctgttgaactcggcggcctgggtcttctcaatcccttcgtccgacttctcgccatgcgtgagaatatgaaacaaactccccagaagctattccacaaggcctcgctgatggaggagaaggaatacgagggggacaaagaagagttcaaaaggaacggtgctgatgttagcatcccattttcgagcaaatggggggtcgaatccacgtcattcatgtccctggaagactacacccggtatccagaaacatttagctcctcttttgtgcgcgtgtacaggcaactagccgaggttccggatgagatgagtgttgatccgacttggagcttggtaagggagcaaaagtgccttgatcaaaggtcctctgaaggttctataaatgctttctggaatacaatgacgccctattggaaatgggtggcggagttttaccacgaagggatggtccgtacttacggtagcctggatgccgtgaatcgccagtctatgcccctgggtgtcgtgaagacactacgcgagggtaaattcagatggcagggttaatcgagaatccggtttattcagcagagcaaattcatttccgaatataggataaataaaaatcattcacttgctattctaactaaatattgacacatactagttaactagtagttacatcatgaaactagtttgttgcactcctctgttaaacggcaatgtcctgtagaagtgaagaataaaccacacctagagtaacaactcactaattatctcggactatgctcattaattatacttacatagatatacctaaacccagctgtacacattcatttccctgagtttctaccctccactcctggtgatatattgtattcacacccgcagtcgttcaccatcattatgatgtatataaggtttcccgcagtctgggtgctgcccggtttcaagatgtactttacttattgcgatacttgtggcgctctttctatcatcgccgaaatacctttcggcctggcaaccatggatgtagccctaatttacctctattggggaaagtaccttcaactacgatcggaactcgatgtcggctctcaagagggcttagtagctataacggtctatatatacagccatttgaatccagctctctgcttggtttatcttatttcttcatctatcttctctgacacttacatcattcagccctcaggtataaatcgaatccacttcaagtatccctcaactagccctcactatagagtacattcaatactcgattcaccccacgggaacaagaccagaaccaacccttcctcacaaatgaccaagggctatatacaacatcgcacgatggcatatgtgcaaatggacttcaactggctcgatattatttctggggacaacgggagcatagacccaaggtaagcatctatatctatatctcttccgatatacattaaaatgattcacaggaccctcaaagtccatcaggtagttacagcccaccaggacgaaacatttcggtccgaaaaacagccatctccccagccatctccccagtcatcgccccggtcctcctcctccctggacctacgagctctaggtccgttgaagctggaacatgaccctccaatcccgagactaatcagcaagtcatctctccgtcggctgcacaattgtctcaaccaacagggccaaaggcgaagattcatcgagttccgcgtcgaagaagaggacgcggtatcactagtcaggactccgactgacctggagtacgaagattccttcctcccgttctgtggagccttaacgccaccgtacgggagatcctccgaagacacctgtcattcttcatcaccgtcgtcttctcagcctgagcctcagtggttggctcttgtgattgcgcgagttgtatcaagcaaggcccgcaaatcatgtcgggccttgaagaagaagttttctcggtgattccaaggaaagaagattgttacatgatccaaggcagatcatggacccccatgcatattattgtctattatcgctggcgacaaatcaccttgtgccagtaagcaaaatcggggtacttttttgcctttcatccggaattaaatatatatttttcactttcaattatgaaaagatagaatgaagcatatatttgttaaacaagtgtcgttgaagtaagtgggagaagtgtaactagatgatcgaaatgtgtatctaagagcggtcggcccacctgcccctgttatctcggcagagttgcctcttccccataaagccaccgtgaacaactgcggccaggacatcaacaacacccatttccctcgaaccaattcttccacaacagccaacatggatcccttttctgcagagggcggtacgcattccagttctttctacagctccgatcaacgctaacccagcttccccgcagagctcctcaacatccacagcgccttccactcaggccaataccagaatgtgattgacttcgagaccgccgcgctctcccccgagaaccagctccccgctcaagtcctccgactccgcgcccagattgcccttggccaattcgaagaaagcctcgccgagccctccatcgaagaggacagccctgacctctccgccgtcagggccctggcactgcagtcctccggcaaaacagacgctgccctgcagctcgcacaagagctcgcagagaactaccccgaaaacaacacggtgcaggttcttgctgctactgtgctccaggcccagggacacagcgaggaggcgctggcgctgctgtccaagcaccagggtaacctcgaggcgtgagttaccccgttgcaagtaggccgcgaatataacggagcatgttggtctgacattctatttctcctagcgtctccctcattgtccagatccatctcgtacaaaaccggaccgatctcgcgctcaaggaggttcaggctgccaagcgctggggtcaggattcgctgctggtcaacgttgccgagtcgtgggttggcttgagagttgtatgttgatgataaattcataatcttctggttgatggttgatggtctatgagtgctgatttgtgtttctgtacagggcggcgacaagtaccagtctgctttctacgtcttcgaggagctcgcatccgcacccggtacctccgcaccgctatctatcgttggtcaggccatcgctgagatccacctgggtcgtcttcctgaggctgaggctgccctcaccgctgcccttgagacataccctaccgacgtggagttgattgccaatagcattgttttgaatgtgttggctggcaagcagaccgaggacctggagtcgtatgtcatcctatcggagaagaagatagtgaactcgatgctaacttttatctcgtctagccggctacagcaggtccagcccgcgcacccccttctcaccgatatccaggagaagagcgagtttttcgatactgcggcggcaaagttctctgctaaggtctcatcgtagaaatatttcaatgctgttccctatatttgttatgtttaatccgagtcaggggagcttatcctacttgtttatgagagacacgacctatctcaatattgcaactggtgtcatatttggatatctcatctgtaatttggtacaagagataggaacaatacaaatctgtttctatcacagccgagaagccaaccattctcgcaacgccgaatgagtcggagtctcctccttcatcatagtgaaaaacggcgcatcatgcgactcatcctgcccaatcacaaaggtaatgtctttgaactccgccttgaccttcttcgcaaactcccgaataggcgaaagcaaaagctcatcctcaccaacaagaatcaaaatcctctccgtcttagcactctcccaccaaccagggggtgcatcaaacggctggttccaattatcctccggcagaccggcacggtaagaaatagtccacctctccaaagcctcccgcggaagaatatccttccacttattttcctctatcgacggccagtccgtactaaagtgtatccaaggcgagaacgcaaagacgcccgccaacggcaccgacagctccagcggcttgatttccgcgtgcgggtgggacaggtgcagcagcgtcgcagcggcaaggtttccgcccgctgagtccccgccgatgatcacgttggatggtgagcggcctgtctcgttgatgatgtagcgcagggcctcgacggcttgtcgcatctgggtcggatacgtcgactcaggggtgagcgagtaccgtgggaagaagacggctaggttgtcgcctgttttgtccaagtctttcagcatgtcgagccagaattcgaagtacgctgccatggcggggacggcgaaaccgccgcctgtttttagaagttagtattttggttgatatcatgcatttaagttatgattagactttttcctctgtggatgctaatttctccgagtgttacacggtggggatcatagacgcaccgtggtagtatataatgacgttcttggcgtctttgtttccgatccagtggccctcggtgttgtgtgggagtacgacagtctcgggtttgagaccgtgctttttcataacgccttcgtaggccgctggagttgaggggctgaggtacctgtgcaataatacaatgtcaatgtcgtgtccattctgatgtttgctttcttgcaacttgcagaagaattggagagagagaataacatactgcatctgacgatctgacctccgagtaaggagtttgcgaaccacagcggacacaacatagtgatcgtaacgcctagggctggctttaccccggaaaacaccagcaatggcagcatataccaagctgccgcaaagggacaggtacatgaatgggatatctgctttttcccagaaaccgagctgcggcccagggccatcttcgttcgacgacatggtggtttgagtgattgaaagtcttccgctcagccatgggcttttgtatcctcaatgccctcagctgtggggcagcgggacctgagtccgttgggcgctgattggttctgcgctcatatgcacgagcgggacctcgggaactatcagttcgggtagatgcgaaaggctcggtagccctaacttcctttatctcccgggcagcttacaacatacatagtttcaacaaagattcatatgaactaggagccctaataaatactcaatgaagggtcctggtgatatgaaacaggtgttcttcctggttggataacttggattttgataattctcccggaactatatcaaaaaacggagcacgttgggcatgtgccgaagctactgtgagaatagagacttagtttggatgggaccgcttagagcagggaaaaaggaacgaatagagagagaaagatagttgtatgtgactctttttgtatatacatgtgtgcatcaggagaaaagagatcctagagggaagcaggtcctacccagcagccagctcatcactggctggtttggcttatctataagttttcaactagacacatagattgagctcataaacccaggctttgcttattaccatatagccctggaggaagtgggccacgtggcacagctgaaaatatgtactggaagtgtgaagcggtccacaactcagctcctcatccagcttaactccagcttaatcccgatcaccgctattcaccgcccgtctctttttacttcggaatatctatagtccgtgatcgtcaccaaccctttgattgctcttaccttaagccactggggaaattataaatacctggtcctccccccagattggttcccttttttcttccttcttcatcctagtgcaagggctttacacgtatcagtgaggagacatccgagatcgtgtttttgctggttgaaaactaccaccttgactgcttcaagtgagccttacggcttgcttgggaatttttgaaacatgcttacctcaactccttgactcttgagtcctcgagttgagttcctttgaatttgatgccatgatggatatttgacctcagtgtgcgatcaccagtatcacgtgctgccacatttagatctttgttttgtttgttcgtttgcttgctcgcttcctgtttgcattgtttactagtctactttcatagattgtttggtagatagctaaacgagaggtttagggtttgcaacgtttgcaaagtgtcagttgtatcaacaggctgcttcccactgcacttgcttcttccttcatccttcctgaattgattcccttctttcttgattgaatagacttggtacgtcaccgtctttgcttgcataggtagttgccataattaccagttgatttcacatgttccttccttccctatctatactctaccttccctccccatctgataatgctgaaccctcttgtacagaaaccataccacatgatggaacttgaaagcgatttcatttcaagccacctgccccattagctaggaaacctgtattctcgatcagccatttttgattcaaatgtgcacatagaagtaagtggatatcatgtttgcattgtttatcaaccccggacccaaaaacccgccaaggaacgggtcgggtctaacccgtctacccgcggatttaacccataatatatcctcacgtttgtaattgatgaatgtggcatgatagttatcatagttttcttaataacgatgtgaagagcactcggcctttcgagactaaatgcagtcttagcagtgacgttatgaagaggattctgccgattcacaccgactaagttgagtgaaccccacaaatacagtcgtctccactattccttctcctccttttccccttccccctgctatactctgtacttggttttgaattggatgactcttttcttgaaataactagctagtaacaccgaaggctcaaatatactataagccatactgataatgaaacaagtgagccactatggtgaggtttaacttttgaggcggctcaaaatcaaaagctttatagtcggggttgggtgttgtcgtcaccccttgaataaggccttgagcggaagaaactccaattacaatcttgaaatgaaaatcctctgtgctaatttacccgaccgggacagacactttgacctcttgttggcaaaagagtcctcttcagcgacctgcgatgacctttcattggatggaatcagcatgcaattcaaaactcgacttgaaaaaagggagataacaagcaaggcaaaccttccctgggaggacagaatgagcgaaaaggacggaataaggttggcggctaaagatggagacgttggagtgaagacgctctagaaatctcgcatgtgatgggcccatcacctctcacggatagcgggctagctctagctaaagccatctatagccagcgaggatctcattcgctaccggtagaacaaggggctgggcaactcgaaacatgtacaatcttgccgagtcagaaaaccgacccgcaaacggacagttcttgtgctagctgtaaacgagatctctttcccggtgtggttttagatggttgaaagcagcgtgtgatactctttgatgtcatattagctacgcagtgactcgggcagccgtgtatggtctgcgtcgggacaaagttccctaaagtatattccacgccgaggcacgccgacgataatggaccgggcaaaccccatggggtaaatgatctaccaagtgagcaatatacgagggaaaccccagataataaaacgcccataggtcatcgagtggggccacttgtcgtggctttctcaaacttgattacgattcctggggccccgcattcctgggctctgcattcctggggccccgcgattcgtgaacaaaggtgcctcatgctatagagaggcagtagacggctaaaggtagattaagcggggcgaacttaacccaatttagttgtataggccgtaatgctatagtgcgaatttcttctcttatggaagatatatagtctacagatgtccgactattcttgacatcttttcatcactacgacactccgtgtccttcgctacaatgatgattaccaatatttatgtgatcacagtcatcgctgtgatcggaggctcgctcttcggcttcgatctgtcttcgatgtctgccatgtgagagttatcttcggaggaaacaagcgctttctaatcaatgcagcctttctaccaagcaataccgatgctatttcaacgagggacctaatgggcctccattcaatgatgagtctcactgttccggcccaggttccaatctgcaaggtggaatcaccgcctccatgtccgggggttctttcatcggggccttgatctcgggcttcgtgactgatatcttcggccgaaagtcggcgattcaattgggagctatcgtatggttagtcatgtttcaatgcgctgagctgaaagtagctgacgtgatccacaactaggattatcggaagtaccctctgttgcgccgctcagaacatccctatgttaatcgtgggtcgattcgtcaacggtctgtgtgtcggaatatgctcagcccaagttcctgtgtatgttggagagctcgcgcctcctcatctcaggggcttggtaatgggtgctcagcaatgggcgatcacatggggtgttttgatcatgttctatatctcgtacggctcatctttcctcacaggccctttggctttccggctaccttggggtcttcaaatgatccccgcgattttcctcttcatagggttattgttcacccccgagtctccacgatggttggcaaagaaagatcgctgggaggaatgttgtcacattatctcttctatccatgccaacaacaacctcgacgagaactttatccagatggagatccaacagctcaaggatgcttgtgaattagagcgcgacaggaccgacaacagttacatcgatcttttccggccgcatatgctttggcgcacgcacattgtcgtctttgtccagatctggtgtcaactcactggaatcaacgccattctctactgtgagctccctcctgtccagtgtggtggaattaccactaacatctctagacattacatatattttcggaatgacaggcctcagtggcagctccaacttggtggcgtcatccatcagctccgtgatcaacgtgattatgacaatccccgcactcctcttcatggatcgtgtcgggcgtcgtccattactcatcggaggcagtatttctctcttcatctggtggaccctatgtgctggcctaatgggaggctacggtgtcgcagccccgccaggtggcttggacaatatccccgaagagagttggttgatcacaggagctcccgccaaggtcgtgattgcttgctcctatctcatcgtggcctctttcgcgccaacatggggccctattgagtgggtgtatccgtcggagctcttccccctccgtctacgaggcaaagccgctgccttgtccacagccagcaactgggcgttcaatttcgctctgagctatttcattccgcctgcttttgtcaacatcacttggaagacttatatcatttttgcagtcttcgccttcgctatgaccctgcacgtcttcttcgttttccctgagacatcggggaggacactggaggaagttgaagatgcgttcaagggggttaagctggcttggaatatgggtgcagagaaattcaaggatgaagagataacgcttgaatatgagccgaagcaagacgaaagtgaaaaggctgtgcacgttgaggatactataagatcgacgtgaatgtatatattgttgagacagatcacctgccatggtacctggtctgccaggtttctacccagctaactattcagtcagctagctgtttgtttgtacagaatcaatgctcctccttctccccttcttcccttctctttgccctcttttcttttggaagacaggatagcatcccttttcttgaagcaacctccacgcctagcgaattccgagaggtgagtaatatcaaccccttggttcctcaatttccatggattttgaacttctcgacaatcccgaaagtgttccatgaactcggcataggagtaaacgttgtcccgtagagcacaaacattagactgaaccagtgatgacctcagagccttttccaaagcaattcaacaaccactacagcagatcccattctgaatgctaccgctcttaatatcgagatagggtaaagaggtagtcaccatataacgtagcagcgccattcccttagactgtatcactcgcgtcacctcgtcatcttcacatatgcatgaccttctaaaaattctgtcgacacaatctgagttctccttctccgcaaaatttcacccattgaatatactcccgataatggcttcacggtaggcactgagctcatgtggacgcgcttgctcacagcagaatatgaatagtaggatatggtgctccatttccagtcacatgtcctcctttgcgattgttcttttcctgtctctgttgctcttctatatataattcttcgcatactatttctggcacatcccttatgcccgtctaacaccccacctttttcgacgtgggtaacgagccgcttcagatgataagtcttcagttggtaatgtttttttttccctattggatccacctaatagtatgggcctaatgggccagtcgaggatgcacattgcattagattgtagacgctgcgccagataggtctttctctagaagcatcctacttagtatgaatctgagtggctctcttatcgagcattctcttcgtgatagaggcttttcctcttttctcccctttccgactagcggctagttagaggagagtgacggtcgtctacgtaattgagaacagacctgactatatccgaagctgcctctcgatggcggtctaaataatatcggtatcattaaatcgtttagtcaaattgcggtaggttcggtcgtttactgaaacgacaatcgcagtattattagctcttacctgacaatgatgggcaatttttcgtcgaagaagaactttctctaatttcttctctaaaaatagctgataaaaagcactaggggccaaaataagatcttcttctgtgtcctttgaatcacgccggtgagtaagtagttgggtgggtgaccaccagcgaatcctaactgttgtatgtttttcgttttttttttcgttttttttttcatctagtagacattctctctcatcgattgtaaagtgtagaatgatggaacgggctattatcattacgcagtctcccattttgtaccttcagcaatttgggagacttctttgcacttccttcccttcttggttctatagtacaacatgtggtatggcaactcccacctgtaattcttcaacagatttcgatatgtagagtgggtctgatgtacatttactacgtgactataagaagcgaagaagtgatgatcaatggaagatatgaatgatacccgatgccgatctaactactgccatgaagctccctctagttatagaaacgtacggcaaagatgtgctcaggttctcaaggaaactaaaaaagtataatattcgcagattccaccttgttcattgaagcaacgcagttccaggtacttagttctgactcaaaatcagaagagtcccctcccccaacattcccctctacgatgggatgagaaggacctcctcagccccgtagtagccctatccctaccagggaacattgcagagccagcaggtatctctggcggatcataaagaatctggcattttctcacatctggtggtaaaagaaatccacctttgagacgaaatcctgtaacttccgtgtttgacggaccgcgatgatcttcgttgaggacagctgaggagcataatggcgtctcaaagttctggaaacagactgcaagacatgtcttatctgaaagcaaaccgaggcataaggttgtaccggagaggccttgtagcgagtcttgatcatactgtgtcctccataggatagagacactttgggatagcagttctttatcccaaagatactgcgagccctcgacaatagcttgttgagcacgtgttgatactctcgtgcctatcctgcggatttggttcccggttgaaacattgaaactcgtcacaaagacgggattgccatctgacacatcctgatatgaaccccaaccggatacctgtggtgtgtggtcaggtgttaccattcgcggaagccctcggtcgttggtgatcaatgatagatcgtgggtaaagcctattgggaatcgaagaggcctgcgactggcttggtcgtacgtgaatgagattgtaccgacctatcgctcgaaggtacatactgcattagtaacttagaccgtaaatgagaggaggcaatattctctcaacacacatacctcttgcgattctccgacaaggagaacggttttccctataagggaattacctgctgtttggtgccgagccgtcccgacagctggcacaaatgagttccttctgatagggagatatcgagccattttcttcttgatcttctgataccaatcattcatacgaagcagaggcgttggaagcatcgttcggagagtgacgaatgcgtgcgtgggtaccgtaatcgcctcttccccgctagggaaacgaagcttcagacctaacgcggcgtatccatcgacagagttgggcctggtggtaattgccgcaccgcggggaatcacgttcagagtcggttcatcctgcaggatatcgtactgtaggcgtaagcaaccaaaactgtctgcaaatccatcgtggagccaggaatctttgatatcggagcggttcttgaagagaatcacaatgaacccacttatgaacaccctgacgccgagcgcacacggaaacatctcccgtaacaggtttagatcatttggagaaaggaattttcgggggttgaggataacactgagagggtcattctggagtttgggccatatgacagttgtccgctctatgtatcccgatggttgaacatgaatttccaagccccctgcgtgagtacctgtggtttttttgggagcagaatgtggcgctatggcccacatccacttattatcccactcaagtaccatccagacaggttggaggcagcttagagaagggtggtaggttcgaattaactgccgattcgcatcggtcacgttcggttcaagaagggcacgcgcggctgcggctttctcatcgccccactcagatgagtttgtttctaagagtgaattagcatatcatatactaggctgtattgtcgaagacgcaaatgcttacttggtatctcaatcatgtgccgaaattgttcgattgaatccggcaaaagatcttcatgatgatcaatgcactcggctggtatggcggggtacggaaaaatggaggattctttggcagataaacgttgttttttatagacaggtgagctatgctcttgaagatgaggctgtcttaatccgggcatggtgatggtgatggtggatggtgactgagtataaatcgtgtgtgtcgaagctaattggcttgccgagtgtggatggacaaggatgcaggtcccactgacaattaccactacacctaattgggatgggccaatcagcgtctacttagttatgtcatcttattggtttctaatccctgtccgcttgtttcaccgccttctctaatctcaactggcagatagactggtatcatcgtggaagaagttgtgaccggccgccagatgatatgttttggtggaaagccccgccttggccgaagactcgctgagcgtaaagatggctgcgcgcaatcattgaccgagcacgatcgcagcctggccaacctcactgggatccattgcctaaagcaaaagtgtgaaggggtgcaagacccataacaaaatatatgtaagatttgaagagaagggaccacagctttggtctttatgccgcctgtgtttgaatcgtattggaaagtgacttgacataagtattgcacgccgcctcaaccccctacattatatgatattctgccaaccggccacatttttatgagtctgacattaattagacttaggcttcaaagactagaaatgcggtcattggctccctggagcttatattcactcatttagctgcaaaggcacatcatagccaataaaacgtgattcagcatctttatccaggccataacaatcagctagtacttgtagctgctcttctgagagtatgccatcgaggacagagcctatagataattttagtcgtgaagaaatgggtataaacatcaagttcttaccagtattgatttcgcgtctttctctccaagccctaatccgctctttcaatagagcaattgagtgtccttgagtattagaaacagcctggctaatcggaatgtggagtgaatcaaggttctctaatatctctgaggcgcgactgtattgtccaacccaagcttttcgaataattgtatcgatttccttgatgattggtctgtatcttaggcaattctaattccccatctctattcgtagaaaactcgggtttgaagccatgctccagttgaaatagtagagagcctattgcaaatagatcagttacctcagatagatttggtgaagggccgttgaccggaagcggtagatctgagataacgagatttggttgactaaacggactagcagtactgaaaccacaaaggatagcagagccccgattattaaacaggatattgtcaattcgtatatcagcatgaacaattccaagcttatgaatatggcaaagaccagcggtgatctcacgataccaccgaattctggtaggctgtgtaggtatctcactcgccggtaacggagaatatctgtgaagaaatatcccctccgcttgatcagtgtcgatagcttcgatgatattaggatgtggccactgctgaaatagtcgtagaacagctcgttcatcctgtaacaagctagagtggaagatggtatctgaggcgtagtggtatcagtcgctgtcagaggcgtcgctcccgggttgttcaaaaatgcgacagcttttgaggacaatgtcctcgtcaacctcgtagacttggccggaagctcctatgcccagtattttcagatcagactgaaatagcggccgtatggtataggtgtagttcgatgttccgccgactgtatcattggactgatgaaagctgggtggataggatctgataaagagcggaaatataccagacaagataccaagtgcgccttcaaaaaagagcttccaggccgcacatacagtcgagtaatagttccagaagtagattggcattttgccggtaccgggaaattaggagacgtacaacttgtagaagtggcaatcaaaatcagcggcgtgcagacaccagggggctgaatgtagttgataggaagctaagggggtcagtggggtggtcgcccaactcgggtgattctcaccgtcacgcaaccgtaaaacggcactcatacacaagtgccaatgatgagaaactaaacaatatgttcaaatttacggatgacagatcgtgcgcctggtctaccggatgtatttctggcgcctgtcggcatattattagattggcttaggcgtagtaaatctaaagctcagttgcatcacccatgtggtcaattcgagatttagcagcatggcttataataatattgtggttttgttatttcataccacaaagtcatccctatctctcatgccacttcacaggtttgcgccgatcccagaacggggtgttccatcttgacacaacagattagaatataacaatttagttaccgctgacctagttttcctcaccggtcggggtcaattcacagaatgctttgtaggtcgtaaagacatcatcatcgccctcaccgctgccagtgttctcaatcacacactcagcggtagcgccgacgaagaaaacatagccctccttgacctcctcggtcttgttgctaacagtaatcttgcccttgccacgtgtacatatgaagatactggggccgtcgatcgggtcaaaagtggccttggcgccagttcggttcaagtcggccttgataacactgaactcgtcgataggagggtcgtagagcatcacggacgaggcgctagagtaagcagtggcgttcaaaatggcatacgggtagtctgtggcctggatcttctgctcctcgattggtgcgtaggagtaggtcagcatctgggtgagggtgtcaacgtccttgaacttcggggtgaagcccgctcgcaccacgttgtcagaggaggccatgcactcgatgacatcaccggaaatatacgcgtggatatcatctgccttcaggaacataccctcgccaggctgcagcttgacaaagttgaggaagaagaatacgaacaggccgatgtcgttcgggaactgtccgttcaggcgcttggcaagcgcagccagctcagcggggttggtagggttcgtctccacatcacctgccagggttgcaaaactgtcggggctattgtccgcagccgagataaggttcttgcaggctgtctctatcttttcggatgaagactccatcagcgtggtgaagagggagcgtagcgcttctttgttctttcggatgacagcaggttcctctgagttttcgttgcccttgacaatttgctcgaactcactcgccgcctgattgccaacaagggtgcgcagaggctctacagcttggaggaaatgtgtgatctcggcgagcgggcggaagccacacataccctcgaacggagtgatggcaatggtcatctcgggcttgtgattgtcatcttgcaagcggttagccatgtttccgggtgctcgtgtatcgagtgtgatccgaagtaccactcaccgggatagttctttgggtcccgggcatggagctgctccgcgagcttcttgtttggatgggcttggatgctgagcgctttacggatagaaagcaccttgaacaggaacgggagtttgcctccaaatcgttcactcacatcggtcgacagcaaggcctggttatcctgaaccatgtcgaggagggtacgctgtgtctccacatctttcgatggaagagaggggtgtgtgcccatccagagctataaattgtgagcccatcaagtcgaatattactattgatctctcacttacttctgcatagggcttgtcagactcaattgtaaagtccggggcggctgttgtggcggcatacttggccgctgctgactcttggccaaccttgcctatgacgggatgttagtgcggggaacacaatcgcaagcgggactagcttaccccagtcgtagctattgacgcctaaaggaaagtatgtcagctatgtctctcttattgagcatccccaaacttaccgcattgcagccgaagtagtggtatctgcatattgaaatggatgtttggagggaaaggcgggggtcaaccagcgatcttgtattagaaattccacgccaagccttcggtgagagttgtcagagagggtcccggatgatatctatagcacacgtccagagcttgaaaaggagaattggtctggtttcactcagaggcattcccggctttttgtttatgggatttacggagtggtatcctaatctgtcatagattcctaatgaggtagtacttccgcaagcatcctgccaattagagccaaaatgtacagccgcatcgagacagtatagtttgaataggttcaaggtcaaagtatcccagaattaatcatatataccctaaagaagacaagaaatacactatacaactgtcgacgtcgacacatacaatgccatgtcccaaagtagttagcgtgtcaaccccgaccgcccgggggaacggggcccttatcaccgcatctccaaccttcaagtaaacaacttgttgcttcaaggagatatcaataccacagtggttctggtcggcagtaagctgcttatactctttgcacattctttacactaccccattgataaacggtccgaggatgtctcgcaaccgcccccgacccagagacaacggatttggcaataatgaggaactggagctctggaccaagatctgccaggatattcgaaaatctaaagagaagttcgatcaacaaaactcattatcccagcagattcgagctttggtagacaagatcgcccataatggcaaccgtgagtaccccccgcactagagccctcggctctataccgcaaagctccaatatgcgcttcgcttacaattaatccgaacaaccccaagttcattattaatcgtatatactaatatgcgcttccaagcagaaccaactatggccgaacacgaccaactcgacagctggctccgcctaagccagaaactcagcgaagacgagcgcgcgatcatgcaagacgagccatgcgatgtaatcaaaaacctagaactgctcactgccctgcgcaaagcatctgaagccgaagcgcctccacatcggtccacatcattcaacaagtcacgcaagaaaagaaatgaactcgaaggttcggtaaccgactcccccagtgcctcgggggctgacaagaccgcacgctcaaaggggatcgtcccacgcagcgcaagcgtctcgtcaagcacacaagcccgcgaaggggggcgccaggataatatcatggtcaagatcgaagaagggccgtcagaagggacgaagggcactgtcgcggaacggagtggcttgctggtggttggggctcaggttgtcttcaaacacaacaagaataaacaaggggtcgagggtgaggggatccaatgcataatcaaggctgttaatggcgacggcccaaagaaacggtaagtgatgttaggtcgtttacatctcgtctcgatttacgttgactgacgcgtcatgtctgattcagatatgatgtgcaggatcccgagccgaatgagaatggtgagcagggagcggtttacaagactaccgctgcctctcttattcccattccccagctcagcgcccacttgtctacatatccggctggcaagcaggtcctcgcgcgatatccggacaccaccactttttatcgcgcggaagtgatgggtgccaggaaggacgtctatcgcctcaaatttgagggcgaagaggacgacaaagagatggaggttgaccggcgatttgtgctggatattctgggcaagtaaacccagactgtttctacgatctgatgtgatgatgataccatttaagcgcggcgctatctggagttcgaatgcctaccatggatatggagctttcatcttgactagatactttagctagagaacaaatcttttttgaactatgataattctgtttttagagattctacgcacagaggctgaggctgaggctgagcagagcagtgccagatgtctacaataaaaaagggttggcataacaacaatgattcaagccatgtcattcccatcatgttgcagaaacaccaatctgacgctattacccccaacggcgatgcaatccagcttcttctcggtcgggataatgccgattgccccctcatcgagcggatattgatggcacatactacatttcagtctcaacgaacattcacgacactgacacgcatgatatgaaatatagccatgtctttgaaaatggccagggcattgatgatggatgtacctatgtcgttgatatatatactggtggcgtgattaattgccgttattgtttatcctttccttccccgatgtcggcttcgagtcgggaggacaatattcaatgcttgactcttggccactaaaaagccatgcatttcataggatagtgtaactccaggtcaaacaagtctgagatatgtcataagctcttggcgaacacaattctcctatcctgggtggaccaaggcccgagagaatgtgctagagtaagcggtatcaaagcgatgactcagcctgcttctcctcatgccgagggagcatagccggagcattgtctacttcgccattaaaactttccatttaacagaatttgccctatatttccgtcagatcgatgcttccgcactattcaattcctacccctgcatactagagcacctgcagcgagcttcacacgtcacaccttccgactaccccgcctccgccgtcgcaatgaccgacctaccggcacacgcctcaccaaaattcgatgcgcgttcgcccccaagcagattagatggacactcggatgatctgagtcaggagagcattgcgtcaggtgaaaacaccccgactctaccggactcattgctctcgcccgcattcaccccacctgcaacccccgggggtacattgaacttggatttaaatcccaccaaaatccttcaccaaaaccaagcagcagatatccaccataatagccaggatgccaaaggcctcaaattactcccgcagcttccagcagtggaatgtattgtgcgggcgcgaattccaacaaccaacggagcggaaatgttcctacacctctaccacaatgacttggatggaaaggagcatttggccattgtatttggaaacaatattcgtagccggagcttggacagcgtgcggccaggggagaccgagatggaccgaatgatccgcggcgcgtacattgggaaattgcgcccgggtcgagtgagcagccggtatgatgagcatctggccgggtcatcaacgccaaagcaggtcgagccaccgctggtgcgaatccactcggaatgttatacgggagaaacggcgtggtcggcgcgctgcgattgcggcgagcagttggatgaggccgcgcgtttaatgtctttccccgtcgaagatcttgcctctgatgcgccgccagaagtccagtccctttcgtcacattcgacaggtggtgtgattgtttacctccgtcaagagggtcgcggaatcggtcttggcgagaagttaaaggcatacaatctccaggatctcgggtcggataccgttgaggcaaaccttttgctccgccatccggctgacgcccgaagctatggactagctacggccatattggaagatcttggttgtggcgcggatgccatccctgagggaatccgtctacttaccaataaccctgataaagtccgcgccattgagggccctaaccatgaggttcttgtaaaagagcgggtgccgatgatcccattggcatggcgaactggcggtcagaaaggaattaagagctctgaaattgaaggctatcttaaaactaaggtatgtttgcaaactattggtcagttaaggattgatactaatatgccgacttttgatagatctcgaaaatgggccatatgatccaataatccatcagcttgtcgttttgaacttttgcctccatcattccccttttcatctggcttatgctttctttcttgcattggaacttacaaaaagcctttgtatatgatcgacacgaccgaacttctttgtgcataatcttgattctttgggcttgttccaaggttgtatatggcgttgatactctgtatattctttttttgtgtggcttggttactcaatgcttccatgttcgccagcttctcctaaaaattggaggttttgtctctagatatatagcacttggaacaaataaagtcagtttcacggtcattcccaagaaggaattcgataatacgcatgcccgcatgaaagtttaaatgactatctcaaacattgacccacatagcagtcacacgtcttactccagagctcctgattttctattctacatttccccggcctgtatgggataagcttaattagcgcgtgtgcaaggccatggccacccgcactacagacgccaatgggcatgtggccccttcgcccgacctgtccgacttgcctgaacgtgcgcaatctactccccacggacccgaagactcgcgaatccctgaacgtgcgacctcgatagatagagcaggactcttggataatggcgcgacgccaggacgcaagcgcaaactgaatagcatgtcgtcaagaggtgttgccaacctcactcctgatcagttggcgaaaaagcgggccaatgaccgccaagcgcagcgcgcaattcgagaaaggaccaagggccacatagaaggtctggagcaacaggtccgggacctgtcatcacaaaagccctaccttgatcttcaagcagctctgcgtgagaatgagttgattcggtcggagaacgcggagctccgccaagggctgaaagcggcaatggacattctccaaccattgatggctaagccagaactgcgaggtgagttcagcattccaataaaattcaagtttggggctgatatagatagatgcgtctcattctctagctatacccaagtccgccccgcccgcttcgcatacatccccattgtcctacaccgaccacctcacccccttttcaggcgagaaatcctaccccgagtctcttgccagccttgatacgccttctccgactcattctgcgcctaatttcgggagtcgccgcaacagtacaaatggaagccctccgtcggcatctctccgtgtcgcatgggactcgcaacgccataatatcactcacggcctagacctcggctgcgaggagcgtctagggtttaatttccttcttagtgatatgcatagtgttcccaaagtcgacgttgttcaccgcagcaccccagataacctccgctatccgcagctgaacccttcgtcttcaatatacccacatccctcgactactccctctaaaccagggccacctgcattcgccgctccggtacaaaacttaacagcgacatgtccgttggataccatccttttggaatttctccatagccgacaacgcgaggcggctcaaggcatccctagacaaaaattagccgggccaccgtacccgagtgtctcttcgctgctgaatccggagaggagcgtctactctcatccagtctcaaaagtcttcacagatatcctgcgcgcctttccagacgtcgattctctgccggagcaggttgctgtcctctactccatgtttctcatcatgcgctggcaaatttaccctacgcaagagaattatgagcgactcccagattggttaaccccgcgcccgacacaacttctccatccacaccctgcttggatggattacgttccctggccgcgaatgcgtgacaggatcgttaccaattaccagaactatccgtttgagaattggttcatcccatatacgcgtgagatgagcctcaattggccttacgaggatacggactgtttgctgtcaaccggagactcggacgagctggttatcaacccggtcttcgaacggcatatgagaaatttatccaattggtctttggggcccggatttgcaaaatgttttcccgctttggcagacgctacacgaatcatgccgaagccaaagctcaacccatcaagcggaacagactcacatagtggctacacgaccacttaagcggcattccaactggtccacctctatcaagttgatcttggttagaatttttaaattccatgcctcttttcggcgaaaaggaaatcctagcttttagctagtcaaattgtttattttttttggtgcttagttttcttcggcggagtcttaatacacaagggaagaagcatgctgtgagaagggccacggtcacctcattcgcgttgtcaatagatgaatcttgaagagatcatttctgtctggacattcaaacaaatacaaatcttcttagtaatagttactctgttgtatatcttatgggagcatggttttgactttactctttcctgctcttctcattccaaaacgccagaccagccttctggcgtagaattccgtacatcgaactgctatccaggcactctccgccatattctctcgcagcctccatgttagtcttggcaatctcaaggccaggaagctcaacaccctgatcctgggccattgacatagcatgtctagcatccttgatagcaagagaaacaccaaatccaggatgagagtccaggggcggcgcataagcaccggtagtcaatctggaaacaaagataagtatgaaacgccatgccagcaccgaaaaaatactgtaacacacctcttagaataccctccggcaacagcaccaaaagcctcgccaatgagttcttccataggaccagttccaagtccggtcttctcggcaaagacctgagcctcaccaacagcctccatcatgttaacagtaacaatgttacccgcgattttcagaagggaagcctttgtcgcatcctcaccgcaatcaatcacgcgccgacccataacatcctggatcagaggtttgacggcatcagtcgcactcttcgggccaccaatggcaaaaacaagtttgccatccacggcaattgggttcccgccgaagaccggcgctgctacgtacgatgcacccttgcttttcagctccgatacagccgattttacagtatcgggatgcactgttgagcagtcgacgaagatcttgtctttcaaggactggcttgaacccatggcggtggatagcaggctttggaggactgcgtcattcgagatctggaagaggctttagacattgctatgtatttctcggtggaatctgcttaccatggtgaaaataattccacattgagacaccaacttctcgaaattggctactgggattgcacccagtgcttgcaggggtgctccgcgcgacatcgtgcggttcgagtagatcaggctcaaggccttcttcgtggctaggtggcgctgcagattggaggccattgctaggcccatggacccgagtccatactgtgttttgttagttctttgttcataattgtaggtgctctagaggctgattacccagccgatttgtggcatcgttgctcgctctttttcctctggatggattcaaagggcgacaatgggctctttagacaacgagtcaagatcgattcgagggattcaagcgaaatttggcaatccagagtttacctgtgcagggcaatgcgatccttgtatgagtctactttgtagggacgataggaatggtggagcgtgtttcccgaggatatcggtgtcggccgacaggatacgcttcaacgttatcaacggtactgcatatctgcaggttaaaccgggcttggacattgttcaatgaatagtcatatgattcgtctctttgccatattcttgcttggtgtgtcgctgtagtcaagtccacgtgtataccccttaatgtgagacgttccacatatactataacctgcgcatctattgatttcagcattatcccatgctccttaagacctcaaaatcttcttttaggccctaatttatcatctctgagttcgtctggtctaagaatgcgttgacgtggtcacgtaccgtcatggctgcggctcgccgcccaactgtggggtgaatatcaggtacggtacggtcacgtaagttatgatgctccgtctgtcgtggacttgacttcaaatatccccaacacctccgctctcccctgaaccctcctatttccactcatcttgggagtttccgaatataatctcagtcttggacggtacccctactcccaaccgtcgaatccctaattcctccaacatggcggaaatgcccattggtacacaccgattcccccaggctaccgtgtcccagctccaagctaacaagctactccgcagtcctcgatggaggaaccggcttccttaaggtcggctacgccgcccaggtatgtcgcatgacccctacagtccatgtttgctcttctctaatttatatttcctcgtcagaacttcccagagttccagtttccctcgatagtggggcggcccatcttgcgaacggaggagcagggcggcgacatcgtggtcaaggatatcatgtgtggtgatgaagccgccgctgcacgatcaatgctccagatcagctatcctgtatgtttatatcggggttcttgtcctcgcctgacctttctaccccgcctccgcaaaccagtcgtgttgtcaatgcctaacccgcgctgctttagatggagaatggaattgtcaagaaatgggatgacatgcaacatctatggaactacaccttctacgagaagatgaagatcgaccccacggaccgcaagattctcctcacggagccacccatgaacccgctcaagaaccgtgagaaaatggccgaggtgatgttagaaggatacgggtttggtggtgtatatgtggcgatccaggcggtgctggcactgtatgcccagggtatgtgatacaagaccacagtgtcagttgaagaccaatactgatgtcatgtttcaggtctgagcagcggcgtggttgtggattccggtgacggtgtgacacacattatccccgtgtacgagtcgaccgtactcaaccaccacattcgccgccttgatgtcgccggccgcgatgtcactcgcaacctgattgccctccttctgcgccgcggctatgcgctgaaccgaaccgctgacttcgagaccgtccgccagatcaaggagaagctcgcttatgtctcctacgacctcgagttggacaaaaagctttccgaagacaccaccgttctcgtcgaatcgtacaccctgcccgacggccgtgtcattcgcgtcggcagcgagcgcttcgaggcccccgagtgcctgttccagccacacttggtcgatgttgaccaacctggtatggctgaaatgctcttcaactgtatccagggtgccgatgtcgatgttcgctcgagtctatacaaggccatcgtgctcagcggtggtagcagcatgtaccctggtctgccctctcgtttggagaaggagttgaagcagctctggctcacccgggtactgggcggcgacccagagcgtctgaacgtacgtcgaagagaacccgacaattaccaatataacatggctaatgattttccagaaattcaaggtccgcatcgaagatcccccgcgtcggagacacatggtgttcctgggtggtgccgtgctcgccaacttggttagtctcgtttcttttcctttgaccccggccctgctaacactattttcctcagattgccgacaaggacgacatgtgggtgagcaagcaggagtgggcggaacagggtgcacgcgccctggacaagctcggcccgcgatgaatggattttatttaggcggttcctggtctgctccttttttctctgatttcctgcttcgcattgtttgcaagccatattgcctgggtcttttttccctattctcgtttccttctttgcctccaccttccccccatcattgtcgatacactcccgtccatcttgtagtttcccctgtctcttcgcctgcttcctacattgtgcctagactggtctggcgcgggtggattcagggcgttcatggtagaaaagaacgaaatatttctatcggcttttctttgtataccagctttgtaggttatctacgtataactatggtgggacttatgatcatggttgcatacagtctatcgtcaacatcagtataaccaagacaaagtcatacccatatgtacctgcttctttcctccgctagaaaatggctaccctattcctgggtagaacgaaacgtgtatataaactcaagaaattcgaaaatgcaaaatgctgcacgcaaaatgctgcacgcaaaacgcaacaaaccaaatgaggactatcacaacagaaggagtaacacaaagagagaaacgaagaccagtcggcaaccaaccccaaactaattctcaatggctcccggcgagaccgccaagataaccgcaagagtagcaataatcagcgaagcagccacaaacgccgtaagtgccacactaccccgactagccgggaacttcccccgaataatccaatactgactctggaagtagcggtggaagccaatcataaggataaggatcgagacgccgatgaaagtggagccgaggggtttacccacgctacgaagacgggcggttgcagaggaggtgtggaggtcggctgaatcgtagcctgacgagtcgaggtacggtggaaggatgcctgcgtgtaagccggatgctgggtcgaagaagttggtttttgtctttgtggaggcgctgttcaggcggaagagttgcgttactgcgatgccgattgaggcgaaggctagggaggtgcgcatccaggctaggaaggttcgttctgttggaaagggggtgggtgtcaggggtgtctatgcatgttttaaatataggctgcgtgtgcatattgtacctaatgcgaggtggtcgcgggccacactgcctttgttctctagctcgagactgccgtattgatctgcgaatcgactataccaggactgatggggctcgggggccgagtcttgggtggttgattggctggcattgccagggttcgcgttgtttaattggtctttgagctgggaggcgtctgcttgctctgtggactgatagttgcgccccgcgggaccggctgtgttgattggggtagattcggtggattggtatgatgtctgaggttggttctggttacgctcgtggtttcgggtcgaggagcttgagtgggaccgggtgctgctggaggaggatgacagagctgaatctgtgggcgagcgtgacgatgagtggctgtttttggctcccccagaggtgctggagcctctcagaggcggcgccaatgagtcggatgtattcattatgcctgtccgcgtgtttttgtgtcactgaagagagtattgtgcaatccacgatcgccagggaccgagtttatgcaggtctgaagcgccggttcgtctatgtcaatagaggatgaaaagttgctgtttgagacaagatggtcacggtgatggagagcaatagttgtgtctgttatgctggactcttactatctgcatttcctttttctgctctcttctccaattgcatcaagtataatgtcacttcgagcaaaagcacgcaaggtgatgatctcccatccacgtgaccaatccggggaagcgatcacatgctccactctaacccacctgggtgaacccttagtccgaagtgtcgatgcaacttgtcaagcttgacatgctgatatggacatccaatgtagatatttacttctagtcaaccatttactctgatcttcatatcttattttacaagctaacacctcattatcttacccgtctggtaaagtgcgtcatcctctgtttaaggcaggcggtcagtcctgcttcatccctttatcaacttatcgacttatcgatttccgctcccctcactcaaccaacacaatggcgtcacaggcacctttaccatctcctacggggaaggtcgatctctcgaaaaagctctctgagttacggtcaaatagccgaaggggaaaccccagttcccgagatctgactccagcaacccctcctctcccttcgccgcccgacctctccggccaccagtaccagcaaccaatccgccgcatcctatctcctaaagaccatgagctcttcctcgcatcgccgacctataaacttgtcctcgcctttatattcgggctaactgattctgtgcgggggcattctatcccggacctccagaaaaagcctcaatccgaatccatctccaaggtcctctcagtcatcactcaaatacgcgccctcctagccaaaaacccgccaattgaccagggtggatccagattcggcaaccccgccttccgagcattgtgcgacgatgtaagcgcccagagcgcatcatggcacaccaacattctggggttgaaagactctggcgcaatcgaagaagcgtcgacatatttaatccactgcctgggctcacgggagcggattgactacggctccggccatgaactcaacttcatgatgtggctgctatgcctgtaccagctaggtcttctccccgccagcgacttccccgctgtcgtgatcaaggtctatgtcgagtacatgcatctcatgcgcgagatccagtcagcttactacctcgagcctgctggatcgcacggtgtctggggtctggatgactaccatttcctgccgttcttgttcggagctagccagcttgtcgggcacccgtatattactccgctgggtattcataacacagctactttagatgaagagggtgataactatctctatctggatcaggtccgatgggttgagagtgtcaaattggtgaagggactgcgttggcatagcccaatgctggacgatatctctggttctaagaattgggccaaggttgagagcggcatgaagaagatgttcgttaaggaagtgctgggaaaacttcctattatgcaacatttcttgttcggaagtcttatacctgctgccgaaggcatgaccgattcttctgagagagatgctgagcatgagcatgcccatggccacgaccatcctcatgagagttcagactggttcggtgactgctgcggcatcaaggtacccagtaccgtggctgcgggcgctgagatgcgtaagcgtatgggcggcggatcggacctgcgcccaattcctttcgattaaggtcgccgatgggaagttggaagttggcatgccaacaaaataatgaatcaagatgactagcatattagaaaatgcaaaatgattatctccatgtgcttcagtcaatcgagtaatttgcttctactcctacctactgccgtatgtacctctgtatactccgctccgtatacaagagctcttttccggttagaatcaacgacaaagtacattactcccagtatggaacatatggtgagacttttgcctgatttaccatcataccatcactcttagttattagtgttattagtctaccttgggaagtttagcaaaaccctagactcggcaatgcagaagcttccccgcacggagatctatagaccacgaactactcatctcggcgattttgcggacttgatcaacagaaatagtcgacatccatcaacttcgcttctcggtgatttcacgggctacaagaactataatcggaaacaagcactcggttattcaatagaccgcggttgagacaaaccatgatataaccccatttctgtctaatgtaccaacaatcctcgaacagctctcacatttatctacatcaaaaacatgtctacccagtctcgagctcctgcatccgctgagtctggaacatttactcagcttgggacattgccgaatacatacacttccgacatcagcctgcagcgaatgctaggatgtaagtccagcgtggggaccacctttgttcaatctaacctgaagacaataaatagggtatcttcctgcagagactctcaagttagttgaaccccatctcgcacaatttggcgaggaggctgtttcgccccaaatctttgcatggaacgccgacgcagagaccaacctgccatatgtcaagaagtacaatgtctggggccagcggtatgggtatgacaaactgattacgactgatgggtggaagcagttaggaaaatggggggcgaaacatgggttagtcgttctcttttttgatatacatttgacgctaatacgaaatgtttagggttgtttcgctgggctatgaccacacatacggtgttcatagacgcactgttcaatatgctgcgtatgttataattccttgttctttcccgaactgctactaactaccggacctaaagagtgtatatatacgtcccctcgtcgtccatgtacagatgtccgatgagcatgtccgacggagcggcatttatattatcacagcgtctcaaggatctgccaaatgatcatattctgcacactgtatttcggaaactgacctccagaggagacgactactggacatccggccaatggatgacagaacgagcaggcgggagcgacgttcaaaacacagagacatgggcgacctatgcaccattaccacaagcatcgaaaacatccgacgtcctcgccgagggcgactatttgatcagcggattcaaattcttttcttccgcgacagacgccaatgtcgcttttctcttagccaagacagattccggcaaactgagcacatttatcgcgccattacggaagacatctatcggagcagatggaaagccagaagaagtatctaatggcgtgcgcatccaccgcctgaagaacaagcttggtaccaaggaactacccacggctgaactggaactaaagggcatgcgcgctcacctagtcggcgaaatcgatcagggcattgtgactattgcgccactattgaataccacccgtatccagacgcttcttggaacattatcaacctggcgtcgtgcgattagcattacaaagaatttcgccaagtcacggactaccgtcggcgagccattgtggttgattccgatgcatctgcgcctccttgcggacgtggaggtaaagcatcgcggcgctataaatctcaccttcttcacaattgccgtgatgggtctgattgagaatccatccagctctgcgagacatgcacatatgcctcaggatctaagcgaagcaaaggtcatcttccgcgtcctcaccgccacatgcaaaggcgttgtcagcaagatgtcgatggtaggcgttcaagagtgccaggaagcgatgggtggagtcggatacattgacgaaccagacgagcctgagttcaatatctcgcgcctcctccgtagtgcagccgtgtatccgatctgggagggtacgacgaatgtcctggctagcgagctcgttcgctttttgatgaaaaatgataacctgtctgttttgtcggggtggctcagtcgcgtgttgtctttgatccgcacgtcgtctctcgcgggtgcattgaagcaggctctggcttccttcctttctcgcgtgacatctattcgtccgctggctgcgttgctggctgatgctcgcagggttatgtttacctttggctggattcttgccggggcttttctggctttggatgcggaacgggatggggatgaggccgcgatggaaattgctcgcagatggattctgttgggtgagggtggtgtgggtgagtttgtctaccgggatattgtcaagccgtatcaggcctttgattcggcttccgggagggatgagcatacgcggttggattgtaagattgcttggggtgttgaattgccgtccagggtggtatttgggcatcgatctttgagcgattcgaaactctagatgtaatcaattggatgaagtgcttggattcaacatattcaacattgaagcagataagtcaggttgtttagcatggtaaagacgctttgagattgcttgatcttatcaacatcccatccaggggtttctaagaaatacaagtgatctcgtcggcctacggccgtcgagatagtcgttgcagagcaaagcgactgattctaacttctaatgctgcgcaaagcccccctcttacttgttacgatccaacgttgccttgctttgcttgtttgcttgtttgcttgtttgcattagctagattgtttgctagatagtttcgcgagatgattcgaagtttacattgtttacaaagcggtcaggacacagctataagaactagctgtccgatagcgatccatatggatcgtgacaagaagtttgatagctctaggaaaacttaggaaaggtatggacattatatagatagatggtaaaccaatacgtttggttgccttctgtgctgctttcattggagatatgccccagcaacaagataatgctgggtttcggaggcagacagcgacgcgtggatgtcgaaaatatctggtcactgagccatctactgccctcagaggcaagctcctatggttcccttatctatttccatcggaaaatatggctgatgttttccttttcttcctgtcatttacgaacgagaagtctgtccccgattatttcgtgtacgaatatgatccacttttgttattctacgtctaactgatcgaatgattgccggcatatggtgacattgtcggagattcgttcaggccggacctcgccctcgttataccctcatcattccttatcacaccctcgtcgtaccctgatacgattcctcgccctaccggctgggctcacctcacagcccaaggaatatccaggtcgaggaagaggtgtcctagtgccagcaccacgtttgtttggagataaaaactaaggcacatcaatggaggagtgtatatgggcgcttcggattcgggaaatgatccgaatctgaatatatgcgtctacaagggtggaagcatggatcaacgcatgtatatacctcgggaaacagaatacttttaagcataataataccttcctaatactcgcataatactaggcaatgtagcgaatacgggaccaatcctgactgaatacttgaagaatactacattttgagccaaatactcgtagaatacgtattatgctagaacaacggtaggatgtgtaggaatttgggaatacgttttcgggccgcaatactggattatgaccgtcatactaccggtattcaaatctaaagacacccctggatggtctacatactagttagatgctgacagaccgagatctggagatctctacagaccttgcgtactccagacataacgtgccatgttggtgaggctctctttgcctagtcgaatatcagcctctctggggatctcaggggcccgtccgaaaatgtggtcgaatggaattgtgatcgggtgctgcgagactgtgacgttgttcggtgcttttccaatcacgcaggattgcgtgacccttgggcgttgggcaccggcgtcccattcccacttatcgagtttgagctcaggtttcttccggctgactttgatggtgatggccgttttcgcttggcctctgagggggtcgacccacatgcttgcgtcgtcgcgcaatttggtttcagtctcggaaacaccgacctcgaggaccaccccgggtcgtctgggggcaccacgagggggccgaagtgggccccagccccagtctggccgcttcacgtttccgtcgccgacgttgacattcacgttaccgaatccttcaactgcatcacagagtcccataggtagcaagatttttgtgaattcggtttgcagtccataggaaacttgagcatgctcgggggtggacattctgaggatcagggcgtgcaaggccgcgttgtagaataaactggtaccagcgagtagatcagagagcagaaagtcttgctcgaaggttgatggatcgatgaaaataacgaagtagtctgagatttcggacccaagtggttgacgagggggtaatttgtgcaggcggtgcttttcattttgtaggatttgatcgaattgctctttccctttataggtgtatttgtttgtcgaaggaggcaggttgtccagaaagcgctccacatcactttcccattgagatccagccattatgaattatttctttcagtatttatttcctacgagtgtttagaagaaaaagtagataaagatgagaaaaaaggtctattaaatgaatcggagttacctcagaatgagcgcatagtatatccatcttgatatatagttgtattcaactcgccaccgcctctgattggccgaattcccaaatcgcaacagaagaacatcgagaacctacattttcaaccaacaacacacccaagccaaatattacaatccactcagtcgaacatcgcactgcaatctaaaaaaaagaagcaaacccctcatatctacgccaacacacaaaaccgatcgcccactccccacctcttactccgcacgccgcgcacgccgcacacgcccatctcccctggacccaacacctctacaagcggcacgccacacgaaaaggaggtagcctggatagtcgcgacctacggcattgcatccccgaacctaacccagcaccgcgagcatggcgggcgacgagtactctgtcggcgggggcaagctcaagctgaaggggagtaaagtcagcggagggcggatagagaagaaaaagaagaagagcgggaagaaaaaggagggggaagcgacgacgcccaagccggagtcgacgccagatacgaagcggccggaaaacgaaacagaggacggtgtgaggtctgaggaggatagagagaaagagagggatgcgcctgggaagactgaggccgagaagagagcggaggaggtcaggcgcaaacgggtatgttctgttgttcttttttgtctttttgttgggcttgcgctctttctgcttcggctttgttgtacggggaaactgactttttgggacagttgcatgagcggcttcagcgcgaaggtgtcaaaactcataaggagcgtgtggaggagttgaataagtatcttagtcggctgagtgagcatcatgatatgtacgtcttgctctttttacctttgttgtttggataagctgacattttacataggccgaagattggaccgggctaaatggttatacggtttcacatgggtttcgatgcgatcaatctgttattcaagaataccatatctgtactattcaatacattctgttcaactgtactccgtaaggctgccatgtttcagtgatgatccataatccaggatactccactggagtataacgtaatcggtaagcgagtggccactgtaagcgagtggccaccccacccaagaggatannnnnnnnnnnnnnnnnnnnnnnnnnnnnnnnnnnnnnnnnnnnnnnnnnnnnnnnnnnnnnnnnnnnnnnnnnnnnnnnnnnnnnnnnnnnnnnnnnnnnnnnnnnnnnnnnnnnnnnnnnnnnnnnnnnnnnnnnnnnnnnnnnnnnnnnnnnnnnnnnnnnnnnnnnnnnnnnnnnnnnnnnnnnnnnnnnnnnnnnnnnnnnnnnnnnnnnnnnnnnnnnnnnnnnnnnnnnnnnnnnnnnnnnnnnnnnnnnnnnnnnnnnnnnnnnnnnnnnnnnnnnnnnnnnnnnnnnnnnnnnnnnnnnnnnnnnnnnnnnnnnnnnnnnnnnnnnnnnnnnnnnnnnnnnnnnnnnnnnnnnnnnnnnnnnnnnnnnnnnnnnnnnnnnnnnnnnnnnnnnnnnnnnnnnnnnnnnnnnnnnnnnnnnnnnnnnnnnnnnnnnnnnnnnnnnnnnnnnnnnnnnnnnnnnnnnnnnnnnnnnnnnnnnnnnnnnnnnnnnnnnnnnnnnnnnnnnnnnnnnnnnnnnnnnnnnnnnnnnnnnnnnnnnnnnnnnnnnnnnnnnnnnnnnnnnnnnnnnnnnnnnnnnnnnnnnnnnnnnnnnnnnnnnnnnnnnnnnnnnnnnnnnnnnnnnnnnnnnnnnnnnnnnnnnnnnnnnnnnnnnnnnnnnnnnnnnnnnnnttaaaaaactatcattcaatttgggattgacccagacgatatttataacttcgatgagactggatttgcaatgggattaactgtaacggcaaaggttataataagaagtgaatactacggtcggagatcacttttacaacctggaaatcgcgagtaggtaactgcaattgaatgtataaacgcggcgggataggtcctccctctgtgtattattttcaaaggcaaggtcttccttaaatcatggttcgaaggccttcctagtaactagcgctttaaagttagtccaaataggtggatatcagatgaaattggacttcgctggctttagaaactctttatactattaacttcattgtgtatagtaggaaggtatcgacttttggtactcgatagccatggaagccatttaacccctcaattcgattaaatttgtgaggaaaacgatattataccaatttgtataccactgtattcctcttaccttttacaacctctcgatatcggttgttttgcggtagtaaaacggtcgtacggccggttggttgagatgaaaatgcggaccgggatcaactatattaataaacttgaattcctcgaagcatacccctccgcacgaattgaagcttttaaatcggagacgattaaaaatagcttctcagtagccggtttaatacctttttcacccaatcgggtactttcaaaactcaatatttatcttcgaacgccaaccccccccctaagccggggtagcgatttaagccggaatttcaccccaaaaaccccttttaatagcaaagatctacgtcgacaggctttgtctattaaagctttacttcgaacccaatctcgaagcctaataagcccttctaaacgtgcattaaaccaacttatcaaaggctgcgagcttgcaatgcatagcgctattttactagcgaaagaaaacaaggatttacgggatgaaaatgagaataagaagcaaaagcgggcccgatctagacggcagatacccgccgaagaaggcctctcagttcaagaagcttctgaaatcattgctaggctggtggaagcattagaaatacccctacaccccccgggcggaagcactcaatcagggttagaaccacgaccacgggctgcaccaaggtgtagtgggtgtggaaagacagggcataagatcaataggtgtccagataaatgatcttttttagtttaattaatttaatggcgttctggttgaaatatttaccttagaaaactatactcttgggtagggtggccactcgcttacagtggccactcccttaccgattacgnnnnnnnnnnnnnnnnnnnnnnnnnnnnnnnnnnnnnnnnnnnnnnnnnnnnnnnnnnnnnnnnnnnnnnnnnnnnnnnnnnnnnnnnnnnnnnnnnnnnnnnnnnnnnnnnnnnnnnnnnnnnnnnnnnnnnnnnnnnnnnnnnnnnnnnnnnnnnnnnnnnnnnnnnnnnnnnnnnnnnnnnnnnnnnnnnnnnnnnnnnnnnnnnnnnnnnnnnnnnnnnnnnnnnnnnnnnnnnnnnnnnnnnnnnnnnnnnnnnnnnnnnnnnnnnnnnnnnnnnnnnnnnnnnnnnnnnnnnnnnnnnnnnttacagggcccactcgcttaccgattacgttatatcatgtgataataaggggctcaagattcaataatatgtatagttcatggctaaaatgaccccaaagagctctatttagcagtccccgaaaagtgaagaggtatgcccaaaatgcgaaagaataaataaatgataaatatcaaaagatcaaagaaaagatgtcaacaccaagcacaacgccatgcaaatgaattccgcaaaggctcaacccaaaataagccgcggccaaaaaccgagtccgatctagatatagatcacgaataaccgaacaaaatagaagaggagaccaagcccaagaatcgaatcagagaagagggaaaagaaacaccgcgctaaatccagaatcaccgcagaggcgcacaagaaagggaagaaccggatcaaatgggaccgaatcgaagccaagccaaggctagcagggatagcacctgatcggccgggggcagataagaacagataggggggaaagaggaggcgagatgggtccgagcctccatagactaggcgggcgatccttaagaataatggcgccatccgcgcccccctttgtccttccagccgagagaaaagcgacgaaaggatcggctatttctcatttctgattgtggttcccggtctcatacgcccttgacaacgacggtgcgttcgctgttcagcttgtcggcatttcgagcgtgtgattctttcttgcagtcctccaggccggtgcaggagtgggcttctagcatgcggtgcttggagcagaagtggccggtacagaagctgcagtcgccgacgatgcgctgggcggcttccttgcactccttgaagttgcaacggggcttgcggggaggcattgtggttgggagtgttggggtagatagagcggttgagaggttgaatgtaaaagtgtcctttcgcgaaagacgaaagacaagagataaataggagtagcgaaggcgagacgctggggagaaggtttgagataagcgccggtttcaagtgcggaggcgagcgggggaggagagactctgtcgaagaaagtagtaaaagggggagggagggaaagatgggccagcacgaccagcctatatatagggtaaatcggaagacacgggagaaagccaaagaaaccgacttccaaggttctaaccagagacgggggggctgactcagtgaggcgacagtgacggaatcaacgagtggagttccaaagttctgttgttggcgatttggggatttccaagtggattcgggtgggttttagtggttttagtggatttggcattcaatcgattatttcgaattaattggatttgatattggaattggaggttagcggttatttagtgcagtgaggtgattgaactatacctgtctatctatgttgtatagttacagagttttaaagtattcaatattgatcttctcctttcttcttctttctttttttctttttcttttttccttttctttgactttaccaaattcctctgcatcccacgcggacgtatcacccaggcgcctggtctcgggcccaatgatcggaatgtggaattgcccgtgcatccaagggcgcctttcacgtgatagtccagtcaggtgtcgcaaactaatatagaaagtctcaactcaaccaactcaaccgatgcgatctcagatcctgtttgcgccaccagagtggcaaggtgttcacccagacttctccgactatggtactccaggcacctccattaccaactatatcatcccgaatataactacaatcagtgcctaacgacactactcccactcaatgcaatgcaaacaaaaaaccatgcaagtcgaccaaaagagctctgacctcgagataaaatagacgagtcgtctgagccaagcccggcctaggtacgacggatgatccgcgtggagctattgcataaccagcatcggtactccgtaacagcatatgcagaggtatggagtaggtacggagttggtgagactaagagaggaggtgatgccctataactactccgtatactccgtacatttcccggtttaggcctaaagtgagggccgatcccgctacccaatttcaccgtctcctctcctctccacatctccccaccgtcgctcaacgtagcaggacgctacgccgtatctgctcacggatccctcgctgataacacgctagacggtacaaatcagaatcctaccacgttggcgtgctctacacgggccacggcctacgtggtcatggtcaatttaaaatagtgactagcgtgcagcgggattggtttcatgatatttatccactggtaaggttggacaagggaaaaagaaaagggaaacgtaaatgtgaatcaaaaacccgtggacgccggcgcagacgccgatgatacgctcaaacccccttgcccggcccaaatcgcaaaaggtaaaaacggaaaaaaggaaaaaagggcgaggaatcaaatcgcagcatcgcatatcgcatatctcatatcagactccgagctcgtttgccttgcctgcatccgggtccaagtagtcctctcgctccgctgcctcgtactcgccgatcagatccatcacaaccgcccgtgcctcgtcaaattcgccaagtccgtcagcaaacggagcttccttcttgtaggaatccaagaacgcatttcgctttcggagcatgtcgtagtgcttcacaatgcgcttgaagagcgtcgcgacagaggtgtggttggccagcatcagcccgctgacgcgatgtccggtttcctcaatatacggcgatttcttcgtgagagccacctggatactggcagggccccaggggatgaaggtagcgaggcgacgctcccggatgcgcaggagtgacttgtgcacgtcggtcgggtcggcttcgccctggatgatgttgaggatgctgatgtagcagctggacttgctggggttgaccgagaccatgcggttcttaggctgtagaagacggcgcatgacgtctaggacggtggtctttcgcaccgtcctggcttgctcgatgttggcgcccgtgaacggtgtgtatgatgtgagaaggaagtggctgcgtggcgtggggatgagcgaggcgatgatcccggcgagatcgttgtgcatgtatccagggtatcggagcgtggttgtagatgcagacatcaccgtagaaacgagttggttggtttggtggaacgagggctcttggacgtgcagccgatcagcgacaattcgtgacagagcgccattgtccaggacgaccacggagtcggcatcctgggtcaatcggcgcatggccagcaagctgttgtaagggttgacgacgacatcggactgcgtgtccgggaagacagagtaggtttgaatgagtttcttcgggaatcgatcgttcatgcgttcgaggatgaaactacccagtccagagcctgttcctcctgcgatcgaatgtagaagcataaaaccctctagtgagtcacttccgtctgcttcgcggtcaatcatatcgaaaatctcctcttgcacgccctcgcctgcagcatatccggtaccccaattgtttccagctccgataccttgttgtccgacgaagaagttctcggggttgtagatattcttgtaggggccagtctggatggcgttgaggacctggaacaatatgcgttaatcatcgtggtcgatttgatatatcggtgaggcctaccctgggttctaagtcgaggagaatcgctcgagggatgtaccttgtgtcgtcactctgccatatgttagccagtgttcttgtccaccaagcctatattttcctcgcaagcttcctatacacacctggtagaagaagacatccttgcgatcaccggccgccccgtcagtcgcatgctcctccaggtttccatctgcgctgatcccgtgctcctggcacagctgctgccagaactggctgccaactagatagaacgaatgttagacgtgaactatagtttctcgtgctccgtttcaaatgactagatcaacgatcgtggaatggatcgcagagttgagccacataccgttgttgccgcactggccggcttggattgtgatgatttctctgcaattgccaccaatatcagcatcggtattcaagctggagagagacctctcaattatgcttgactcggaagaatgaacaaaccttggcatcttttcttcacagaagccgtcgagtgttgctgctcgttaacgcgtatcgcgtccacgcggggaactttttggccgatattgccgcctcaggcagaagctcttgccaccttatgtggacatcaacaacgttacaaaggcctgcaaataaataaattcgcgcaagaatgagagttgattatccgaaatataaatgctttttaatccgcccagctatgctaaaattttgatataaccgtcttccctaagtggtctacttggccaaccgttgccctggaccactagaatcctgccttcaatgctgtgatgaggttgccagcaccggcaaccaccccgtcgacaatccgtacacgtcggccttctgtatctccgtattcctgagtacagccctcccgtaccgcttcctccatgccagccataccagcacagcccagacacacaaccttaacatgagattccgagttgcgaagcaggttgcgggtggcatcgatgatccgccggcgcacctcctccggctccgtggtgtgcagctcaacggctgtcaggccggtggtctcaacacccgcaaagtgtatagagctcccgtcctcgaagtcgtaacccagcgctccctggactgcattggtgagctcctccttccacgcagagccagtggtgacaatgccaaagctgcccttcccttggtacttgtgtagcctctctgctgggttgattggatctctcaacgtgaacccactaaccaaggagagcgcagcggtgagggatgcttcaaagattccagtgacatatctatttctcgtcgagctcgtttcttcgcttgccgtgatgtcctccctgagtctgccgacgaatggatgcgcggagtaacacgctacgagaaaagcgtcgtaattgccgataaactcccgtacgggccagcaattcaatgccgatttgcacgattcttcggcgttattgatgctggcgattggctcgatctcgactccgtcgatatccagggtggagtctggagcagtgaagtattcgaagtgcacgtcttggtagttcatgctggccaatataggcttcaggccttcggtcatatgcgttgaggtattggggttgatgatcaatatgctgtaatcccgttccccttttctcggatccagctggatgatctcgtttgcgccatatcgcggctcgagaatgggactcatttttccaagaatgaggtgaattgaatacacttggctggaaagacaactccttgctctccgggaaaaaaatgtccgcggagaccgcaaacagctccgttatcggttatcggaccctccacaaccccaccatctcctaggagcttagcggactacttctccaaaagtcaatggcttatttatgcaatatgcttcgtggcttcggctattacatgccgaacgagctaattttcttatctaccctctcaaggaatttattcgttccaaggttatcaatcgaaatggcttacaaatccaattgtgccaccagccctccggctctagcactagtataagaaccactccacccagcaaccccgccgtcctcgcacgccatcctaccttcaacacacctcacctacgcagaggaaatttcaattcccatcatgcctctgatcgcacagcaactccagccgagagtgattctcgggttgatgacctttggcccaaccgaggccaaggatgctcgtatcacgtcactggatgagttcaataaatgcctggactacttccagcagcaagggttcaatgaggttgacaccgctcgtatctacatcggcggcgaacaggaggcattcacggccaaggcgaactggaagtcgcgtggactaactctggccacgaaatggtacccaaatcagcccggcttccacaagccggaggtcgtccgtgagaatttggagctttctctgaaggagttgcagaccgatgtggtcgacattttctatctgcatgcagcagatcgtgccactcctttcgctgaaactctggaggctgttaaccagctgcacaaggagggcaagttcgtacagtttggtctgagcaactttacagcctttgaagtggccgaaatttgcgtcctttgtgctgaaagaggatgggtccgtccaacagtctaccaggccatgtataacgctattagtaggtggtgtcctttctcttgttttcggtcatggccactcggctgacagagtgatagcacgtaacatcgagactgaactcgttcctgcctgccaccggtacggtcttgatatcgttgtctacaacccactggctggtggtattctctccggaaaatacaagtcgcaagatatccctgcggaaggcagatacagcgacgcgggctctgcgggacccagatatcgcaaacgttacttcagagatgccactttcgaagctttgagtatcattgagcctgtcgtagagaaacatggtctcacacttgtcgagacggctttacgctggatccgccatcactctgctctgagaatggataatggcggtcgggatggagtcttggtgggagtcagcagcttcgagcagcttaagactaatctcgccgatctccagaagggaccgctcccagaagaggttgtgcaggctttggaccaggcttggttggttgccaaggccacttctcccaattactggcatctagatctcaagtatacttatgatactcagaaggcggtgtttgggcctaagtgagagaaaagggaatgttaagattttccacaaggtccttatatgaatagtacatagttagtgagcaccaatgagaattcgaggaacttggatgctacccaatgagcttcatcgtcctttaaagatcggagatggactaagaccaaacatttgacaatcgtggtcagattcttcatcgttgggcaatatatcttaatacatatcgcatcgcaaacgaattcgcagaccacgtcttctggtctaatccaggggcattgcctgcctccaaatccaaaaatagccgaatgacatgcattcgctaactcgaatccggcatagcgtgcgccacgatcgaaatcatgtgatctggtcagatccagtgatgatgacacctgaaagcggtcatttcgatccgcctcatcggattcttgaccatcttcaccccgagtactctcttgatgcaccttgattatttacgatgcaataatccctactcagtggattgaacccactattcgagctacaactatccctgatcggtgccgagtcgcatatccgaggttgtgcagcatctattgaacacgtggaataggcttcatgggtaaccttttctgaaataaatctaccctcgttatctgcatcatctggatggtggccttccaatagtccacgcattggctccttatacctatatctcgccggcacagtaaatcggacaagaacacccctgacggcggtattcatgtcgaggtagttaggccgactagcaccttccctcaccatcgccgttgtggcttcggatagctttgagctctcagagccgcgggtgacctcaaccccggacgcagtccacgactccgactctgacgacgaaatggttgtcaatcgccccccattacaccgtccaaccgacggccgctcgcaacagcccctcctcaaagatgaccgtcctcgctcccgcccgcgctcgagcttcggtaattatgacacagaaggccagcccatgctgcatgaatcacgaaggccgacaattcggagtaaaagtccggaacgcgacgctgccctggcaacccgcaagaaatatatggttgcatcggggttcctggtgctgagtctgattagcttcgtggtccaaacggagaccgcttcatacattcaaaatgagttgcattggaagaagccgtattgcatgctgtaagtccgagcgcaaagatagcgacaagcccatgcggaacctcttttccggaatgtaatcgcttaccatttcctttccctatgcagctatatgacccacggatcgtggtccttgctctggctggtccagctgggtatccttcggatacagaaacggaagctcacgtgggatgttttctggcggcgccatgtctttttccttcgtaccactgcgcagatggtagaatcgcaggaagtacatctgagtactcgcgcgtccaatcaatcgccggtccgctatatgctgaagaccaccgcctttgtgactactgctctcaccgtcgctggaggatcatggtacgtggcagtcaacatgaccactcccagcgaccttacggcgatctataactgctcggcgttcttcgcatatgccttttcgattccgctattgaaggagaaactccgaattgacaaggtcttttccgtggccgtggctaccatcggcgtcatggtcgttgcctatggggatgggcctcataagaaggtcccgaaaggaggcacagatggcaacgggggacagaaccgattggtcggaaacattgttatcggcgttggaagtattctctatggcctttacgaggttctctataaacgctttgcctgtcctccggaaggtaccagctctggccggggtacgatctttgccaatacttttggcagtctaataggggctttcaccctgttggtactatggatcccattaccatttctgcactggacaggatgggagacatttgaatggccgactggcgaagcagcatccatgctgctcatttccgtgggtgccaatgctagtaagtaccacaccagcgttcaaagcagacacagaagctaacactaagatagcgttctcgggctctttccttgtgctcatctccctcacatcgcccgtcctatcctcagtcgccgcgctccttactattttcctcgtcgctctggtggactggttccgaactgggaactcactttctctagcctcgattattggaggcgtcttgattacggtggcatttttcatgctgagcatcagcacgtatagagagatgaatgaggagcggaagaagcatctagagaacgatgagatcgagtctgacagtgatgcatagatggatccacggaggtgtgcttcgggatgttttggcatacagcattgaattagtattcagcgtttctgacgtataaacttctaatcttttcacacgctatacttgcttcaagccctgtagatgcgcttaaacttcggccctataattggggctgccccagattagttccatggttcagtgttcgatgtatcgacaaagacccaactgtgacatcatgaaatttattccgatcattcaactcgggtatgtccgagtgagtttttctttacatcgagccttggaaggcagatgcgtttcccgtggatatggatatcggcatcccgcacctccggactttaagattaatgcaacgtactcgcatatatacttagccattgtatgatggcgaatcagatccacagcgcaaattaatattcaatgatcatcgtgatagtcccggtgcttataatgtatttatacatatagagttcttctgaatgtaaattactccgtcgtgcagtaaaatcaagaaaaacggtgagcaacaagcgcgagctgctcgacaagtcagcttttaaaggcgtggtatagatgcatatgcaggccatttcgagatccaaagccaggatcagccgccccaattgatttcgcgatgatcagccacacgatgcaattgcaggtccgtccccgtcaaagctgtcattgttattgggctaaacaaagaaactggtccaccgaacgctagggggggataatgtctcacagcgccaggggagtccgtttgtccgtttgtcttggaagtaattttcaccccctgttaaatggcgctaagatatgtctggcgccactatttatatccgatctgcctccacagccaagacaagcgatggagagtgcaagctcggtttcgactctggcaatctcctggcattcacagaggaaatatgacttcggttagacaatccacgagcaattcatgttcatgcattcgttttcaaggcccggccctggctcggcattcaacaccgctcccccgacaatataatccccttgacttgcagcccccccagcgtggcgcactatccatccgggacccaccaggtcaagcgagatttggatggtcacttagaccaagtgattggcagtgacaatatccacttcgtttttctccggatgcgccgccctgttgattggtgccttgaggaccccaggattgaaatacctaggtgccttgattacaggaacggtataaagtacggtggatgcgagttgaaccacttttcacgggagcaccgctaaccttggacttgatacgggtatggtggcaactacggagtaagtcatgacgtcctctacttgaagatttgaagatattattcaaagtgaatagtaatagttatagcgaaaagttacattcctcagagacagccctgtccttttgacagatgtcaccgaaatgtcttacctgcatactgtattattccttcatatcactaaagcagggttaatttaccctggcttgcgtctaggcaactcctaaccatcaaccataacttcgtatgtaatctcatcgctccaataatcggcggtgattggtttgccccccggatggcaacgggtgataccgtgtatggtaagtaacttacagctccagattcgcatctaggtttcccccctcccggatttgttgttctctttggcttcttcctcttcaacctctctacgaccaccttttccaccctcccctctttggccttcgtcgtggccgtccgttcattttccatacttttggataccggtggtcgcttcaatttgatttcactcgttccttttctgcctggcgcggattcaatgaccctccaaggtgcttgagcttgacctccagattcctagcctttctcttgctgaagggaaatcggtctggaggtcttgagcccatctggatcttattgggctttcgtcgtcactccgctaaatttctttattaccgcaccttttttttattttatttttctctcctcttggaatcatggcttcgatttcacttcctccgcagtcccaggcgggcttctcgccacatttcgatacttcgaaccactccaacaatcccgatcccgatcgtcaccaacacatgcacgcaccattgcctaatcccccattcgtttttccagcacgggaccccgatgcccccacccaatcaaacccccctgagcgccgggaacgagccgcattgcccgcattctcttttaatcccggatcggaagagcagtccccacacctttcagcgccctgtttatcgaatcctcgcgcgggtggacaccgtcggcgaccgagtgagtttgttggagacttcttggtaacaccggaatcagttggaccaggtcacaggcgggcggcttcgatggcagatcaacatattccacccccaggaccgggggttggtagagttcctggacgacggaaccatgcccatcgccgttcggccgccatatctaatgtcgacttgaattccatcaccaaggcgcttggtcctaattctgggacaccaagtgcgccttttacacccgccgaacctaaccaccaatctccatccgatcttccttcccgaacgctctctcaatccgctattactctcggtcgtcccacgccgcctgcgtctccacaattccctcccgttcctcctgtaccttccattccggtttccattcaagtggaaatggccttggacaaccagaattcgaatgccgaacgaccagtctctaccgtttcgcatggtatctccgatattgctacaactaagtcacaacaggtggagacgccgactctctcagatcaggtaacaccaagacccgattacgaccgaaaacctcgaccaaaaaccgcggatgcctcttttgtcatggattttatgcagatggatgacgactccggatctatcaaacgttcgcactcagccgctgggcactcccgctctcgaaagagcaaatcaacaccgcatctcgattctactctctcgcccgatgatattcaatccgcagaccactaccggccttcattttctgacactggttccgacacatctggcgatgaagcaactgagcattcgtccgacaacaaatcccctgtcaagtcgaaaaagaagaagcagaaacgggttcgctcttgggccggtcacattctgactcgatccaagagcaagggtaagggtaagcgccatccaaaggttcacacagaggaggagccgcctgtacctcgcgctccagcacctcgtccacctgctcttactcggaccgtctcgggcactggatcggttttagatgttgattttgataatgacgtcgttgtcatccggactccgaccaatccaacgatgccttcttctgcgcttcagcccattcaaaataacgataccgatggttgttctttgcctgcgcagtctctagagagctcatggaaaccgaggagtttctatgaacaggatgttggctcccacgacaatgtactaagtagccctgtcatcgacctcgatgctgcgcttggtcctttcaacactccagatatgcgacaaactactcagggtgcgcccaacaacaacttctcagttgcgacacagcggatgtacagtggcggaagacgaggtgaatttgtcggcccagagatgcggtaccatcggcgcacggaaagtgcaccggcgcttcaaccatttgaccgcactgctctcggcgcattccgtctgggtccgactccggcggtcgaaacgcccgatgtatttgacgaggaggaagaggatgctttcttggctgcttcccaatcgcccaagggcgagcggcttccggtgaacgcgtcaccgatcgacaacgcagttttctcatcatcggaggacgactcgaaatctattcacagcaacgctacctctggcagtagtgatactctgactcgtccccccaccggtagcgtctcctctcagaatgctggcttaggcattcgacaaggcgataaacatctgagccaggaacaactggatgacagaagtgtcctcgagcaggtacacaatgccagcaatcctttcgccagcaagcctcgaacccccgtggaaattctaaagatggaagaatctgggcataaattgattggacccccaagtcccgacatttctcctcgattcctagctgtcgacaagcgaccagcaacctcacccatggagttgctgcctagcattccgcccttctctttacaaccagggatttcgccgtctgactcatctttcccgtctccagatgcttcgcggtcaattgcggcatcctcaactgaccggaacttttccagccactcatatcatcagcttccttcggctgaacatccttacgcatcggttgaagatgttccatctttgaccagtagtgcatcgaccatgaccaacactttgaatcgtttctcggcggcttctttctttccccgtgggcgtctttctgatgaccgcgcagcgtccttctcagcttccggtacccgacgcacaagccaggctaatgcctccaaacgctctagtctagctagcctttccaagctggtcgtcggtccccattcggagcggagtaagctcaatcaggaggagaaaccccctagcaactcatccgacaaaacgaagaagaagggccgccgtctcagccgaatgatgcacttctggaaacctaaggacaaagaaaagtcatccaatgaggcggcaccagcaaacgaacggtcgcagtcataggcgcgcgttgcgtattggttttgatatttttttttcgatttacggcgcaacctcggcatagcgacatcctggcaattatttttgagacatcacttcactccccttttcttccttgcccgcttgcgatagcgtgggcgtcttctttcacccgatttgtacatattttattcggttcagctttactgtggattctttttcttcatcttcattggcggttctatttctgcgtcctccacctagacgctcattacgaatttccttgcctctcaagatgtatgtgtcttgagtatgatctactcttttcttgtcaatccttatgttccggtgtgggtgacgcacggatttattgactctctctacgatcgttgctcctctcaggactttttttaccactttgtttcttttgctcaagggtcttggcctgggatatcattcgtccccattggaacatccattgggtccttctttttccatatctaggacatggctatctgtgtatctattgtgtggctttcgtgtcttccactgttcaggtgtggcattcgtcaagaatttgtctctgtccgattacacagatcgcggataatgaaacactctcttcaattatatgtcatagtttttgtaagattgaatgtttatttcgtaggtttggttttaggacaatttgaaatgttgcaaagcacacgtagccctaaactccaaagatataaatggaaaccactacataatcggaaggatgtgacgacatatatacaaggagatgatgctgtgatttttcaatatatattgaacatcggatatatcccttcccttaatgatctgaatccctcaaaggacacagtttgtgcacaatgaatcgaatgaaacatatcttacctcactttcgagcagatgggcacattatcgtgatcgtcccaaaggatttgatatagttattgctggtgacttatcccttgtaggagtagtagtataaagtaccttttgtagaagctcatggagttaaatatagaaacataggagctgttgatctgatctgattcaaagctagaagatctgttcagctttgtgccatggtcgagtttctagtaaaggctgcaaagaccgggcggtgaatgagtctagttcatttactaaccatctcagtcgttcgaatcacctaggcatcttcatctgttagctttgcaacattctgcatgatcatacgacctggctgtggaggagcttgcaatgccattccaggaccagaatgcgaggctattcggacttccatgttttttttcccttttggcaacctccatgacttggaagttcgcacaaatgatcaccacttcgaagtctcaaattgaagcaaaagctatggcaaagagtcaatatacgaagggagtgcccaggcacaggcctcaaccctggatgcccaggtgcatccaccgtcttacctaagctccacgcgcgggagagcttgcccacgggtggacctgagctctccccccatagagatgtcggatctgcaaccatcttgaagctattcaatacattcatcattcagccagttgaagccgttgaactgctatttttagaccctgctctttggcttcaaactgtgcgcctaaaactacttccagcgactctgctagggttgttgaacttgtcgctttcattctttgcgtctccactaccagtgtttcctacactttgagtgacgtcgattgaattttatgccttttctctgcttgaaatcacgaattgatcgttcacgtcaataaaccaatccagcagcacttgatactcgatctacacgtgtcatagtgaaactcccgttaaacacaatgtctaatggcggtgattcacagagagtgcctatgtcccaagacgaacagtctctttatgttcgcacacaagagtacgcagctacgccgcgatacccaactgtgactagacctattgggcatggcttctacgggggaccagacatgattgacgatgacactgtaatcgtcgaccagaaaattttagaccgcgaatcccacgagtttgcagagggcgactttgtttgcccaggattcttcaacctcgtcgatctaggtgggttcacccgccgcttcaacccctctcaatggaaatacgatatgcgtcgccaggcccagtccatccttccattcttatctcttggcccttcatcatgtctacgtgatcccgaatacatccgcaaccaagagttcacactaattcttgctattcgaaaccggtactctgctcacgcacgcctcgtctcaggcgagaaggcggccgccatggtcggtatcatggcagacacgattgatgttcttgataaccaagagctcatttctgcattcccacgcgctatccgccgcatcaatgatcacctggctggtgtggatgtaggacccaatggaacggggtcagccagctatccgaaaaggaaagtcctcgtcttctgtgaatccgggaatgaacgctccgctgctgtcgtcattgcctatatcatggctatgctcaatgttctgtctgtcgaagccacgcacatgattcaggcgcgtcgtttctgtgtttcaattgaggaaaatatgaaatacatcctcgctactttcgagaccattcttgctgctaagcgtgatgttgagcgtgctaaaaaaatgactgttcatggcgctgcgagtcttgcgccgccatctctgtcgccaacgcttacaaagaagcgaagcttccacgatcagagagatgatgatattgccatggatgagggtgaaatggatatggatgaggatgaggacgccttctatgaccgaaagccgaatgctcccttccaggaccgcgtagtctagggtgagccgaggttgtttgtttcgagtatctttgggatgtgaatggcactgtcattcatggagatggggagggagatggatacgctgaaagatgaaagggaatgaagggaattctttacattgggtagagtagggtgggtatctgcttttctttttatgtctgctttgttgtctgctttattgcttcatggttcttgtgtgcaaatacccagttgcagttgctcattctactatttttccgacatccaggtcattcactggccattgcattcttataactattttcatattcgtaagagcatacacatggcaagaattcagtctagcatacgtctacagatttgtagaaaaatcaatgatggggtcaatatcaaaatctggcaagtctcaagacacgcggaagttgattgccctcaagcatctgacccagcgtttgaactcaccttgtcgattctcgactcaatttgcccctaccttgtgttttcctttcaatctgagagctcgagtctcgcactgattttgcgcgacttcaaagccatcccaattctcccttattctctcttctttcatctcgcgcgacaacctttccatctcacgatcatcccaccacgatcacccatcgcatcctacgatgaagtgcatgcttcacattgacctttagcacgtacctaccatcgatacaccccagctaaccatcaatcgcctcacacctcgtcccccacctcgctcctcgccccaacgcgccgccaaaatgagcagaatgcgactgcgcgacagtatccgcgcgccagtgcgatatggcgaggatgaatacgaagcatcgcgggtctcgctgcgccagggatgcgatgactccattgacgactcgatggagcttggggaaacaggtaaaccgcgcccacaacaggggcgcaagccaaacactgtgccattcaatcccaacctgccacccgctgcgtttcccactttgaacataccacagccaggtcgtggctccaccgtctcagcgcataatcgcggtgttggtggcagccggcagaacgtacacgcaagcgaagctacatctgctttccgcaatgataggtcggtcccgtcgcctccgtctggaaatgaagaactctcgatggacgatatcgacaaccacctcgccagtaacaacatggacaatccggtgtatgcgaggaacgtgaatttggcgcgcatgagtgtggatgcctttccgggttccgaggacattgacatggacatggccacctccccggatagtgatgacgacccactgccagatgcgactcaggtgctccttgatacggtaagtatatcgtgtcttttgctgtgttagtacaattgaacgagtctgatgtgtgtcgttgttttagatcccgaacccaaaatggggtgatctgcacaaggctatgcaagtcgagatcatcgaaaacataatgaagtttcatagctggagacgtgtttgcgaccttcttgggcttgggctagacgaacgaaggcagctcatgattaacataggcatccgcaataaacagatcgaaagggagaatgaaatactggagaaaatgcggcacaaacagcgcagggcgcttatgagaattgataacagcgacttgaagcttttcaagccgccacctcagttggtgctcaaaaggatcacccgagaggcccatcagaacctgttggtcaccggctacacggacctcttgatgtgtcaatcccacgagttcttgaaagccagacagttcctgcatcagcacgggctacctcgaagatatgctggcgattggggagacagcctggtggtgcttcgagaatccggggagcactcccatgagcccgatgagttcgaatggaaagaaaacctgagagtcactccacctcccgatgagaccgaggacataatcaatcctttcatggacccagccagtagggctaagagccaattcattcaaagcattggtatgcacggcacaataaaccccagggatttaatcaaacgcgacactgacccggctcccatcgtcgactggggaaagtattataaacggaagccggacttgtcgtgggacaccacaaagcaccagctaaatggattggtcaaggtgaaggtcggtccacacaacgcggcacggatccaacattgcacggacgccggcgtcgagctccaaggactgtcctcccagacacaggtgaccgccatgccaggatcacttccgcaggggtccctacaagacacaccgtccaaggagccgcggaatgcgagtctcgcccagccctttttcagacgacctgctagacctttcagaagagtcctcaccgactggtcttcgccagttccccaccaatccgagagccaatccaagtatcgtcgagacatacagcaggctaagcttgagaaactagaagcaaaggcagaggggctgcgccgtcgatacaactaccagccaaacctccaggttaagggcgttggagttggaatcagtcccgcacgtggaaccattcagatgatgcccccgatgcagccagtcgaggaagagacacattcgaaattattcgcccggacgcaccgtggaatgacaaatatgaacattgaccgcctcatggatgagtttatcgagctgcccgaggaaagcgagcccgagctacctgatgcgaagccaacttccactgatatcagctccaccactgaggtgtctatggatgatgtaatgctggtgccgacggatggctgttcctcctctccgcagtagagggatacaaccacgagatatggaacaaacaaggattcaaagatatgagaccatttcttcatctgaaccatcttacatggttcctttatgtaagattaataatgtatgattgtcttgaatgatgttgaagtgaaatccgtagttcctggacgtctaatctaaacctggtccgtgcgtcgaacgcgaaatgccgcgttgaggacgcgctttacttcgatttccgatatatcacaaactgccgtccaatcgtgcgcagttttcatccaatctacgagtatccatttgttggaaactcgtacatacaatatcccttggtatcacattcgtttatctctcccctcccagcgcaacttgacgttgcgaaaacttctgcacccctgcgaatgacgtaccatctccatccatctagtactcgctttagatcactcacgctctttatattgtgactcaattctatcagacagaatgtctgttgaagacacagctactcccacggattcccgtgcggggactacggcgcccgaatcggtcattccttcgtcgccgctcacagacccaactgaggctgactcgaagtcttctcatgataaagacgacaaatctaaagcagatttgaccgattcagaagatgttgaggggatggatagcaaggccaaggccttgatgcacttgttgaaaaccagctccgtatgtccaatccatcctcgtcgtatctcatcaaatagtctcatatcttctcgtacctgcaggtctttgtcgctatcatgtcagataaaatgaagcagcaacaagaggacgcacgcttggcagcgatcaagcacaacgaacaagctgccgcgagtcagaaaaaagccaagtctcatgctgaatctgctcgccgaaccactcgaactcggccaactcaagatgcgatggaggagaagacatcctctagtggcaagggcgccaaggaaaagaccacaggatcgactagaggtcggcctaggcgggcagccgccgccaatggcaggcccctttttaaattttttcannnnnnnnnnnnnnnnnnnnnnnnnnnnnnnnnnnnnnnnnnnnnnnnnnnnnnnnnnnnnnnnnnnnnnnnnnnnnnnnnnnnnnnnnnnnnnnnnnnnnnnnnnnnnnnnnnnnnnnnnnnnnnnnnnnnnnnnnnnnnnnnnnnnnnnnnnnnnnnnnnnnnnnnnnnnnnnnnnnnnnnnnnnnnnnnnnnnnnnnnnnnnnnnnnnnnnnnnnnnnnnnnnnnnnnnnnnnnnnnnnnnnnnnnnnnnnnnnnnnnnnnnnnnnnnnnnnnnnnnccgggggggcgacccgccgccaatggcagctctatttctaattatttcaagaaggccgacgtggaagtgactgaagacaatccctcggtgcagcaagcccttgagaaggctgcagacgactacgaagcaaaccccacggctcttggtgagcagcacttagtcgcgacacagcagccagcacttgtgagcggtggcaaaatgagaacatatcagttggagggcctcgaatggctcaagacgctatggatgaatgggctttgtggcattcttgccgatgagatgggccttggaaagactgttcaagcaatctccatgattgctttcttgaaagagaagaatgtttcgggtccgttcttgattgcagcaccgctgagtacggtgagcaattgggtagatgagttcgcccgatggaccccgggaattaaaacgatcttgtatcacggctccaaagatgagcgagctgtcatgcgcaacaagcacatgaaaatgaaaaatcagggagatatggacttcccagtggtgtgcacatcctacgaaatctgcatgaacgaccggaagttcctggctcaatatcaatggcgttatattgttgttgtacgtttgtttcaatccctttcctttacaacatttacacgacactaatcgatttataggatgagggtcatcgcttgaagaacatgaattgtaagctcatcaaagagcttttgacctataactcggccaatcgtctattgatcactggaacacctcttcagaacaacatctcagagttgtggtcacttttacatttcctgcttccggaagttttcaatgacctcaactcatttgaggggtggtttgatttctcctcagtcctggacaacaagggccaggcaaatcttgttgaaaaacgcaagcgtaacttggttactagtatgcatgccatcctcaagcccttccttctgcgacgtctcaaaacagatgtggaaactaccctccccaagaagcgggagtacattttgtatgcccctctgactcccgaacaaaaagatctatatcgggagataatcaacggtacagggcgtcaataccttgagggaaaagctttggagcgactggagaataagagcggcagctctacgcgctcgcaaagtatgaagcgcaaacggagtagcgatgatacaacgccggtcaagagcgccagacccagcgggacatccacgccagctagcaatagaaataattctagccgccgttcccgacgcaatacgcgtcagagttacaatgatctaagcgaaggagagtttgatgagcacctccgcaaactcgagctgggaattgaagtagatgaagagcaggtcgatcccagcgatactgagcttgaagagatgcagcaggctgagaatctgaagcttgctagtacgtcattttcagatcattttttggtttttgctaatattatcttgcagagaaagagattgggcaaaagaagatgcaaaacccggttctgcaggctcgtcttgcctgcaattctccgcacaatttctactggccttggatggacgagtcctcttctgtagacgaaacactcgtctccgcctctgggaagatgcttttgttggaccgtttggtttcgtgtttgctgcagaagggccataagatcttaattttctctcagttcaaaactcaactcgatatcattcaagagtgggcaacaacccttcggtcttgggagtgttgccggatcgacggcgctattgcacagtcagagcgtcaggctcagatcaaaaacttcaattccaaaaagaatcacaagctcttcctcctgagcacccgagctggtggccaaggaatcaatctcaccgctgccgacaccgtcattatctatgattctgactggaatccgcagcaggatcttcaggctcaggaccgagcccaccgcattggccagaccaagccagtgattatctacagattggcaacgaagggtacggttgagcagacactcctcgagaaagcggattccaagcgccgtctcgaacgtctggtaattcagaaaggcaagttccgctccctgctcgaccccagtgcgaattcccaggatatcgaagaactgcgcaaggttcttggcgagaatgaattcgagcggttcgacgttggcgccgaccctgcatcgatcttgtcgaatgaagatcttgacatcttaaccgatcgctctgaggaggcttatttgcgtgctgagaagggattggatacgaaaggggatgcgtttattgcggttgaaacgaagcgcgatcctggtgagagcatcctttcttgagatgtttaatggctgtctacattatttcttctcttccatccaagctacacgctggatgatatctagaggttactggatggtacccatatctattggtcggctagctggtttggttggcgtttacctacaaggtcggatgggtggcttattcgtgtatgttccctagtctagatacctagaccattgctattataccgtatgttcaattatttcaatgtttacactcggcaataaagattatgcagtgccatttatatagagtggcataaactcactgtagtgcgtaggatggaccataacttgagccttagcggcactatagttacatagcccccattccatagtcagagataaagatgcaaagactatccatttgacgcctgaagctccctaacaagaaaatggctgtacatgatagtcgcgagaatcaagaaggtaggacatatatgcagcgaaaggggcaatggaaagaaaacaagaaacaaaaagtattaggccaacaattccgctagtccacatccacagtagtcaatcaccgccgagctttctcgtcctcaatctggctgcggagatccgaaaggacatcatgccgttgggccatatgtttcttcagcccttccacctgttccccaacagccttgacatcctcccggagtcgctccaaatcctgaccatccttagcacggccagtgccctcacgcaactcgcgcaactcccgctccttatactccaaaagcgagagtgcctccttcttaatcaaaacccagttgggccggccatcgttgcgcggcccatcccgcctagattcggaggctttattggcggattctagcttcttctccaattccgcaagctcgcggcgcagccgcaccttctcccactcctcgtcctggatcgtgtcgctgaaatccgttcccttgggctgatacgagcccttgccaccaacgcctagacggccgaggtaggtatcgccgaacttggccttgcggcctgaccgtgtttcggtgtcaccgtctacgccgtaacgctgtgcgggtcgcgccttatcaacttggtagtcaatctggttgtgctcgaatgaggcacgcagcgaggcggggatggtgcgtgggatgcggaaaccctcgtggcggaagttcaatatgtgcaggaaggcgagcgtcgcatctttatttatcgcgggtgatgcggaggggttgaccaggttccaggcggagcggacgtccgtgtcggggacgtcgagcgattcgtagagcggttgtaattgttggactggggtctgtcagcggggtatttttctgggcgcgcacagcgcgctgtaagggctactcacattctatttggccgcgcgcgttccggttggcgtcgtagatctcggcatacttgttcttgtcgtcgggcttcatataccaatcaaagccgtcctttaggccgagcgagtcgtcctcgtcttctatccgctcgaactgctcctgtccgctgcttagtgcgcgggtcgcatggacgagatgtgctttggactctggaactagccaatctggcaggacatttgggacatcttgtagttcctgtttgcagataagacttgtgttagagcgatccgataattattcaggaggatggatcacttacaccattcactaagtcgaagactaagcgcattgcaacacagaactcctcgaaatctagctctccgtctccgtcgacatcggcaatgtcccagaccttctcgagttgatcatcgcgcagccggctgttcctcagcacggaggcggcctgggagctgttgaggtgtttttgaccatttgataatgaggcgaagatctcccaatatcgctcaatctcccattgctcaatctttttagtagccatgatgtatggagctccgataaacgtggtagaggatgaggtgggaacaatggggggagagactcggatttacctacttccgtcaggggctctgaggtcattgggctcacaatgtatttatccttctctgtagtatttatattgaaatgtttatcatagttttcacatggatatctattagaatctatctgttccttgcattatggtacatgatttcctgtgttgagtaggagaactcgttatcctgtcctcacgtagcgattaaatcttcggcgtcatgaatccttcttctcgtctttgttctcttgtttagtcttctctgcagcctcgagtcgctcaccgacttgaataatcgctcgttcagcttccaaaacaagctccggcgcttccaggatcgtagccaacttcttggcatcagacatcttcaacaggacccgatcctcgctctgctctatgtcgtcggcaacctcggaatatgatggctcggtcgcggaaccttccagtactccagatacgcgtttggcatatagctgttctagccccggtaatgagatagggttgaggatattctgtccgacgagtaattccaggtgttttgaaccattcaatgctgtattctcgtcagttttatgagccatcgcaatgtggacgatcaaaactaaccgcgccagtgggaccagccccgatatgccaagtagaaaaagggaatattcggaaccctgctctttattagtataccatatcaccggagaaggctcatgtctttcacatacactggtatcaatccaagtggggcggtaatcggcgcagctattaagcaccacatcatcttcttccgatgaagctcctgtctctccgtggcgaccgtgcgcagtacatcttgaactcgctccaatcgcaccgcgttaccagggaacagcacatccaccttagtcttcccatgatccccattcactcgctgttgggtcttgaatgaaggaatgcttttgagggcccattcttcgtatggtatccgttgctggactcgattgccccagcgaacaaggtgcatcttccatcctttgtcggcttcctcccacttggcccatatttcagccgccttggttgtgatcctatcaaggaccgacagctccttcgctaagtccttgctaaggggccgagcatatacgagaactcgctttgtggagatcggaattaggaacaggcgcatggtggtggatgcctaggaaaattggcaattggcactcaacaatcgagaatcgcttgatcgcgggcaagataattgataggtatccaatagttattaagagatactgtggacgacttcgaaattaaacgttcattgaaacttgatcctgtttttcgtgtgggtgaaaaagggatgcgggagtaagcaggcctggaggtccacgcgcataaatccagacgtcatccgaggtccgcgtacactttggtttcggtccctgaacactttaacttcatacttgaacaagaaacaattggggattcgcgggcaaactattgattgaagtttcccgcgactcccgggtttcagctttcaatttctgtcctgtattatgcacagctccaaagacagccctccagggcggatcattggtgacaagctgacagagaagtgttcgcccattccagaggcgcccctgacatcccagcttagcattgagactgagcccactgttcacaataaagcttccgatctatcacttgcgcatacagatggccagggccagacagcggaagagatcgcatactcccaacgcttcgccttgcgatctttacctggtatggttccatttaaagctcaattcgacgatcactcactaatagcgagtctttatagcctggattcgctcggtcgacgaacccgaggaggacggagataaagctacggcaaacgatagcttactcccttcccaaccaaatgacgcgtgtgtcgctcagcacaaccattcgccctactcgtcctcgaagccgaaacctaaccacacgaccaacaatggcctcttcgtggaggactctccaatggtcaaccgtgaatcacgctgggtgacattctcacgagcgatccaatacccccgaccgcccggtagagaggaacagcatgtcacgtcagaatggctgaatgagaatcatggtgattactcgcaaccatggcgaggaaagcatttggagggcgatagtccggagtacccgctgcacagcggagggcgaagggagatttggatcacgcgtttcagaaacacgcttctgcgaagtccgatcgtaccgttgattcttcgaatgactgtctggtgcttctcactctctgcactggccctgggtggatcaattcagcaaatggctaatcaagggacacaccctcaaggcccatctgcattgatggcaattatcgtcgatgcagtcgccatggtttacctcctatacatcaccttcgatgaatacacgtcaaagcccttgggtttgcgttctccttctgctaaagcccgtctcctccttctggatatcttctttatcgtcttcgattccgccaatcttagtttggcatttgcttcactttctgaggtgacaggatcctgcaccgaagcggaggtcaaccaaacaatcgatcctcgaaatgatgggatatgtacgcgacaaaaggcacttgcttccgtattgctggtcgcgctcttggcttggcttatgacgttctccattagtgttctcaggtaagcccccctgtctataattggcatactcagtccattttctaacgctctgataggcttgtcgagagagtaacacagtgatttttgagccttgttgtgtttcatgaatcttttagctgttgattacatataccatttaagcgatacttgatattgcgcaggcgcaattttagacgtgcatggcagggccgtcaccaccatacaatggatcttgacggaaccacgccacatccttgattctccgcaactttgcttcctcttctggcctcccataacacatatcccactgttttccgagtggatatgcgcccaccatttggaactcttcctgattccagtgcaggtcctctaaaagtcgatgacccacgcccgcaggcacaatgataaaatcaccgcgctgtaccgttggctcaaatcgtccggggttctttccgcctccaaaacacagacgtgctctccctgaaacgaccccgagcacctctggcgttgtggagtgaaagtgggtttgggtgtacatgctaaacacccactgaggaacaacctcgcctactgcctccaggtgatcttcgagctctgtagctgtggcattgaaggccccatggtatatcatgagcggcttggattggatcgaagtgttcggtatacgttgccactcggggatttggcgagtggtcacttgaatgtctgactgtggagttatggccattgcgagtgattgtttttgctttgctcattctgcattggagaaatgtttggaggagttatgttgtaggttgggcggtaatacctcggcgcgcaggtatgacgtcatccttggtgggctgtcaataaagtacatagaacctcaggtatgtaggttaatgaccatacattctcctggctatatatgattggcactttttactactttcgtatttcgtacatactaatcatggcaatccggtgtggtgggctggctgcaccgatagcaaaattccatttgcaatcatactgattggtatcttatactctctataaagtaacttcatacaaaaggttagcgcagtatcgacttttcttccagaaatagttattcggggccgtgtttgtcaggttctgttgtatataattaaggcctgaaatcagtttcaccaatttatatgacgctattgtaaatgattttcattctaaacaagaatttcgctctcttttgcttagccgggcccttctgtgtccgagatgacttttcatccagtcgaatcctgcagcatgcttgacgaaaagaagatcttgagttggatatttctactccgtagatgttcaagtcactctaaaatacatatctttcttcaagcatgataattcttactagggttgatactagttgaatatatcttcatatttttctcctaactagtttgggagttaagatcgatgttatgattatgtaccttttgtatgaagttactatataaaagatacctaatttgcagccgtaggtgttagcttggcacgattgtctcaagatatgcgaatgtcgtcatttatttgtacactacaaagtacacacgtagactagacctgatcagggaacttgaaggttatagtcatgtattcccatctgtttctaagattctaagacagcagggtgcttcttttacagcctagctttgctatatgtctagaagagtttgaagtccgtactagtactgggtataaatatagatctatggatcaagtctcactagagatatgtgtcgtgatacagatatagagacaggtttattatagagaaaccaaagccccaatacatgtatatcaccacatgctaaagtatcgtctgataaagaaataataatctatatacttagagcatctagattcgctttgatcaaaagcatcaaagccgatgatgtagatttagcgggaaagctccgccacctcaccgcctgcggcaacaaggccatcatccccacgctggtcctactcagcctcatcatttctctgctcctgttctgccttatctcttttccaatctttgctctagacgttcccgaggatatcgtcttactcttttccctcgactgtctggaccccactcttgcaacaacccctcctcccaagcgtctaccctcattcgatcactcgaagatcctttgaggcgtgacttgtggcgctacaaccgtcttgaggtaatattcatgacgtgtaacctactggttactatcgagagttaagagcgcgttgctgacttagcggagtaggactctcggcctggaccactcaccttcttccgcatcccacctcccctgcaaccgcgatgtctcccgcgatgccgccggtacctcacaaggatgaccttgattcaacgtgagcagacaatgaattgggattttgcttcaatgcgatggtatggcatgagctaactgggttagttggacattcctagaagcaggaatcgagagcgtcatgctcaaccttgacgccggaatcgatatgaagaccgtaagtgaaatgccgaacgatccctgtcgatgagggtgtttaaaaaatagaagcttactggctgtttttgtctagtacatggctctgtacacgtgtgttcaagattcaacaccacttctctgacgagaaccacactcacacattgatattagggctgtccataacttctgcacatcccaaaaagcagtcgctagtggccaaggcctacaaggatcacgtgggggttcgtttttccccctgtatgccagttctcgatatgagctgacctggacccaagcccatctgctcggcgaggaactttacaaattactcggcgaatacctctcgtcccatctgaataaggtctacaaacaatcacagagccacaccgaggaaggccttcttggcttctacattcgcgaatggtaccgctatacgaccgccgccaagtacgtgaaccacattttccgctacctcaatcggcactgggtcaagcgtgagatcgacgagggcaagaaaaatgtctatgatgtttacactctgcatttggttaaatggaaaacggaatttttcgaaaaagtccatgagaaggtcatggacgctgttctgaatttgatcgagaagcaacggaatggcgaaaccatcgaacagtcccagatcaaagctattgtggactccttcgtgtcactgggtctggatgagaacgatagctctaagtcaacactagatgtctatcggcagtacttccagcagccgttcatccgtgccaccagaagctattatgaaaatgagtcacggcagttcgtggccgaaaatagtgtggtggaatacatgaagaaggcagaagctcgtctggaagaggagaagctccgggtcggtctgtatttgcatccagatgtcaccaagagcttgaccgatacctgcctgtctgttctcgtcactgcccactcaactttgcttcgcgacgagttccaagtcttgctggataacgaacgtcaggacgatcttgctcgtatgtatcgactcttatcaaggatcaaggaaggcttggatcctctgcgcgcgacctttgagaaccacgtgagacgggctggtttggctgctgtcgagaaggttgcttcggagggcgaaacactcgagcccaagttgtatgtcgatgccctactgcaagttcacacaaggtaccagaacttggtcgacgaggcctttaatggcgaggccgagttcgtgcgttcccttgataacgcctgccgagagttcgtcaaccgaaaccgcgtctgcaagacgagctcttctaagtctcccgaactgctggcaaaatatacggactcactgctcaagaaaggatccaagtcggctgaagagtcggagcttgaggagatgctggtgcaaatcatgacagtcttcaagtacatcgaagacaaagacgttttccagaagttctattccaagaacctcgccaaacgtctagtccatgtgagctctgtttctgacgatgctgaaacaagcatgatcagcaaactgaaggaggcgtgtggtttcgaatataccaacaagctgcaacgcatgttccaggacatgcagatttccaaggatcttaataacaactacaaggtctggcaggacaaagtactagaggatgaagaccgaaagaaaatgtgcgatgcccacttccaaatcctgggaactggcttctggcccctcaatgccccgaccaccccattccttgcgccaccggagatagtcaagaccgccgaacggttccagacattttactttgacaagcacaacggccgcaagttgacatggctgtggcagctatgcaagggcgaaatcaaagctaactacatcaaaaacgccaaggtgccctacactttccaggtgtcgacctatcagatgggcattcttcttctcttcaatgaaaccgacactctgtcctacggtgagatcgaaaaggctactaccctagctaccgaaatcctcgatcccaaccttagcatcctgctcaaggccaaagtcctcatcgccagccccgagggcgctaagcccgagccctccacttcgtttacactgaactacaacttcaagagtaagaaggtcaaggtcaacctgaacattcagatcaagtctgaggcaaaggttgaggccgacgacacacacaaaacgatagaagaggacaggaagcttctgcttcaagtatgtctcctacctaatcatcactccccacacagtctatttgtcctaaccttgctatagtctgccattgttcgaatcatgaagtcacgcaagaagatgaagcatgtacagcttgttcaggaggttatccagcaggtcaaatcccgcttcccgcctaaaattcccgacatcaagaagaacattgaagcccttatggagaaggattacattgagcgcatggacggcgatgaaatctcgtacattgcttaaatcgaattaaattccccttcccccttccccttcccgcccacttcctccaatattgcacaattaactcgtttctatttcctttttctgttgctctctgcttttgctactgtctctttccgacaccagtggcttcctgtgtccctttacccttctataccatcgatgatgaaatagcaccgcaaagggtatgggacctctgctggtccaggatagaactcctacaatggatagctagcggatagaatcaggctgataggagcatgaattcttctcattgtatcggcgacttatcttatgtttcttcatagcgctgagacgacaaacaaatgatgacctgattattttccttgcttttttgctcttcgctcttcgctcttcactctctgtttcttctcttttctgaaaataaaaaaataacaaaatacaataaattcatgattatgttctgcatagccggctattaggtattcgaagattaaaacaacgctgatcaatattgaacatcgtagaaacgttcacttcaatatttcattcagcggatcaatatgcgtagtattggctagacccagtgcgtccttatgtatagtcaagacaagaactgtgctagaatggatatgctatgcaaagtagagacgacaagagagacagagaacagaagaccgaaagtccatgaagtgctgaatcaccctagatgcgaaaaacgcaaatcaattccaggtcccaagtccagcgcactagttcgtaccagacgagtctttgctctggaccggatgcgcctcctctttgacagggagccctgtcgccaagtcctcaagcggtgtatctacctcctcgccgctcgggggggtgggctccttctggatctggggaacagtctcctcggtcttgagactcaaccctaggccttcattcgacgtgagagccacaggggcgaacccgtctgcatcaacggtatcctttccatcttgcttaaggttctcggtctgcttgtgcggatcataagccgggaacccctgtgacaggggagacttggggaagggagtttcgatagaatcggacgtggggacgtcttcgtagcgctggaactcgccgctatcgcgtctgagtatgatattactccacctctttctccgactggtgctgcggctcagaccctccttggggctctcgttgccttcgctattacgcaggatggagcggcggcggccgcggtccatctcggctgtttgggtaacgatggacaagatcggggtggatgccgaggtcaattcggcattgggagaggtacttgggctcggggatgtcacgcgcttttcttgccattcgcgccgcttttcgctcgcccaggtgccccacgagctaagatacgagccggctttttggctagctacgctcacggaggcctgagcctgtgtcaggtcgacggatgcccttgggcggtttgcgaaccaggaggcatcggagggattcggtgaagtgggtattagtgatattggggtttctttgtcgatggaggtgcgctgcgattgggaggcggctctctcttcggtgcgtttgcgttgcgcttcgcgcatagtctcgagatcggaccagaagctggtaaatgccgcgctcacttttttttgtccggttgagaagtggcggttcagagcctcgcgaccttcccggacacgctcatcaaggtggaggtctgctacctgttgtgcgagtcgtctttggacatcttccattgtcagaccgccggcgcttgggtgtcgtggctcagtgatggaaaataggagcgcatccgaagtgagacgtgagaacagggcgtaattatatgtggtcttccactgggtaaggaactctgtattgaagtcggtggcagggtctccttcaatgttgaggttttgcagctgggttctgctgcgagccgccgattctccaacgtcggatgggtagagctcctcgtggtacttcatggacgataataatgctaacaagtattcttcgaactgtagtcgaatgaattcttctgagcccataaagccaagggtattgggttgtgaaggatgttcctcgtcccaagtgtcattgacaatttgtgtgagcaggtcaatccagcgcctatcggccgctgagagaactagggcattgcggagggaaggagaatttatgacgatactgtcttcgtcaaggttaattagaatatcactgtaccggtccttttgctggagaagtagcgagtttgttgagccaaccacataagattttgtgccatcatctgccagcagatccagcagctggaggggtgtataggggccaaacatgcttccctttccgaaaatctgcaatgggagccccatgtatgccaacaaagaacttctgtcactcgtcttgagagatgttggtttctcaacagtctgagagtaggtgtcaaaagcaggatctgcgcagtcctgcaagctgttgatgaggccgggtattaaagaaataagcgaaaactgaatcatgcataggcgttcacagcgcgtcccgaagaaaagcatcttgggctgcaacagtagtgctttaaaaagaaccaaagtctgaaatttgaattcgtgaatcatctcccgtagcgagaggccttcataaattagcgaagcttcacacatatcggagaggatgatatccttacccaagttctgatctttggggccatcattcaacagagaaatcaccaagccctcgcggaatttctgtatccatgtcagcatttcattctatacattgccgcaactagtacataccttcaagatatcaatatccgagaagtcactgtttataacagtgccgaattagccagattccccattcaagccaggttctattccacttccatgccagcgcatcagggaagcaaatagcccaccgggacaagtatattccacataccgttgcgcgaaccaagccgaagtcaccacggagagcttctcgcgcaaatgacctactcgctgcggagtatctgtcacgaccacgacggccttttgtaccgttgaccgagtcacatcgggcgacgggttgataagcagactcgaatcaatctggcgggagcaggcgatgccgaacagggaggtttcaggcgcagtggatgtggcctttcggcagagtgtgaaatatgagaattcctcggtcgatctgcgatccgacgagttagtgggtttggcgcaaatcggcgctccttgtcgcgggattgcgccagaggagacaaagaagggaggaaacgagatgcgtgtcggggacaggggtatcgtacagatgtgctccgtcggatagggccatgaatgggagcagagaccagtcattctcggttgctgggtcggttccttcttcggcaatgcaatgctcaatttcagggccgctgtaggtgtttgtctcagtcagccaggttccattatgtccgtcttcgtattcttttcaacgatacgagttcggctctcgagtgtctcgtggctcaccgtgcatggtggaaatctatgactaagacaattgtgtcttgtttatgatggacagccatcgcgccgaacctcgaacggattcggtgcggctttgagaaatgcaattagaatgccgagaatacgcagttcaaatgaatggtttgcaacatgtagaaagtagctgcttctcctccaaaacctcgacgtaggtttcgtttcgcatgagactgagatcgtcgcaaacaggggaacatcgctgatacggttatcgcacggggagcgggcggtgagggtagccccgccaatatgcaacacaggtaggctaattggggaaaagtgatatactactagtagtaggtaactactccgtggtgttgaggaaataacttagattgcgtagatatttcaaaggattataggttatgaggtgctccatcgctgaactgaatcagattccccgtatgatttctcttaatcaccaaccaattcttgacgacgccggaagagttatggacaaggatttccagaaataaaaaaagaacaaaatagaaaatgaaaaataaaataaaaaacacagtgaatacgccagcttcgtagcacccttgaacagaaatagagccagacttcaacttttgaaactggaattcaatggcagaagagcgtttcttgggggagggggggggaaggtctcacgtcaaaaacattatgcgaatgcctgtccagtagcgttgccctgtactgcgccctgtaccaaggcttggccagcctcgttgccttgttcaatgttgtggaagtcgaggatttccgagtacctagggtggaaaattagtaaaaaaatcgtggccggtaacatattcggaacgtacatcatgatcttccaagtatctaccggcaaatcggcatcattgaacgaccaatcgaacttctcttgtgcgacaggttcgtcggtggggtcatggtagggcgccaggtactcatgcgctaatgcttctgtggcttgaatgcgctgcttcgggttgaaaaccagcatccgctcgagcaggtcaaccgctaaaaaaacaagttagcgcattgttcacaactctatggtgcaaactatgacgtaccatcggcatcggcgttcttgaatttatttgcgagtggttggcgctcgcgctttggtagtgacttgacaaatcggagggtctagaccatatattagcatgttctcgtctttctaaacaaagcataactcacattctcgctgcagatagtctggatcacgtcctcgggaggagtaccgagcagctccgtaatgatcgagaactggttgacatggtcctttccggggaacagcggctttccttccaacatctcggcgaagatgcagcccgcgctccagatgtctacctcgacgtcgtacttttgccaggtgagcatgatctcgggcgcgcggtagtatcgtgttgagacatagccggtcatttgcgggtcctgaatgcgagcaagaccaaagtcgcagattttcagatcacagttctcgttaatcaggatgttgctgggtttgagatcccggtggaccacaccggcggagtgaacatatttcaagccacgctataagaacgttagattccggtgccccgggtattattcccgtggaagtcttaccagaatttggtataagaagtactgaatgaattgcttttcaagagggcgcgaagtgagaagtcggtggaggtcagttcccagaagttcggtgacgaagtagctgtagtcgttagtttatactgttcaccccgctttgtaggtaagggggacatacatgtcttccaaaggcgaaatgaaaatgtcactcaagctgataatctgtgggatgtcagcaagtaagactagtccatttatttgacggagtacggacgttctcgtggcgaagatgtttgagcagcttcagctcgcggtaggttcgcttggacagaacgggggtactgaacggcttcatgattttcttgactgcgactggctgtgcggtcaattggtctttggccgaactgtggtattagtggccttgttagtatatacttggtcttggaaatatcttgtgcgacatataatgcaacataccagaccagtccgaaggcacccattcccaccggctgtagttccgtatacctagaatcagttagcaccaacatcctctcaaggcgcttatgaagcaccccaagtagataccaaggaacagggcattgcgaaccggctggtgatctcaaaggtggtgccaaaaatctgggcacgcacgaattccgccatgatggaaggtgggggtatgcaagcggtaaacgagaaagagagatattcctatcagaattccacgtcaaacaagacgaaggagagtgaagatggtagctttccagagaaaattgccagaagaaaggggtcgcgaagaaagcaagtgtgttggcaacaggtgtggggaagggactgggtgaaaagcgcagaaaacaaggccgatgacgttggcgaagtccggttatgtggatgactcagcagcttctagcccgtgtattaaagtgggttctctgaatattatatgcaggttggcacggtggttgtatttctatgttaaaatctctgtggaggtgttgttccttgcaactatacaattctcatcctatctcatgtccaggtgttggttatgcgaacttccaaagttggcaggtaaccctcgctccaccacgcggcccagaccctggtcttatcccggaagatgtttcccttgaacaggattgctcgttgatatcgttgatatagactgtagaacttgtatagacagatcaatgcggtaaattttatctatgtatatctatatatttttttaattctgcgcttaactcgctcgagaaccatatacggagagctcttgggcctctattgagaaccttggcaggtcagagtacaacccctcaccttcaacccccttaagcagacatggtagatatcggaatttaccaaatctacatgtatataagctctaccatagcttcctctctggtgcttctataggtctggtagactgtcccggaagacattgctgtaaaagaggtccgttccccaagcctagagcacatccctccggctatcaaagcacaattgactgtcccaataggccagctccaatattctctgacgtgtcttcttagcttacaacaatgcaactcctggatgcaatttggcggctgggacatgtgaaacaatgtctgccacgctactgcggacaactagtacatgcaacaaaggcctttgaatgaggtgcttgactggacaggaatgcagcttattttaaactctggagatatatctccggggatgtattccctaagtgtacctgatagacatgtgcacattcgcatacaaacatatattcatgggagatatatatatagtgactctccgtggagcctgacgattacctctctacctcacactgcctaggtattaataataccaatgtcaatgtgctcttcctagccttgatcttgccagtgcgccctgtacatccgtctacaagcctgaatctacttccttgtcgtgaggggagagggtcagtgcccggcttcaccgcatatccaagagaagtcagtggtcccaggatgaaagcagcacgcaggtcatgcaaatcaacagaaccatagcatttataagtatacaattctacaatcctatataatggagactatccagctgtccggagtactccgcgtcccaacccaaccccgccttgcctgaggcagtgccccaattttgccggtactctccactttaaagctccagagtgggttaaaagagtatggaacggaatacttggtacggtacggagtacagaactcctaatcagagatttggattggagattcgaggtaaatagaatctatataagatgatcgaacttccgatcgaagatacatgataagaacatatgatcgcacagcctgggtcatctggtggcgccccgttcaattagagcccccggggctgttttctgtcgcttaaacagtcttgttgataggagttctagtattacgatctgtgattgggatggttattgcccggcctaaaatgaatgagatctgacagcagaacgtgcccgtttcccccgggtttttccttacaccgacctgggacatagctatatatggaccagacaaaagaagaaaatgaacagatctaacaagaagcccaaagatgcagttggatataggtaattgcatatcagatacaagatacaagacctataaccacaaagaaaaagaaattaaaaacaggattaattacattaattaccaaatgtaagctgagccgtacctgtttcttacatatcttacactccctctccactcccccagcatgacgatggtcgcactgactctacctctgattcttttaggactcaggacacttttctaccctgactctactctcacatttatcactctctaagctcagtctctaatttgaggtcatccctgcctctccgcgtttacacatattccgcctcccccgtcctaaccgctagacccgaactcaacaactctccttctaaacccgcttgtcgcaactccttcgacctcagcctttccccttgacaccttctcaacctaggtcctcttgaaattggctctgatctcacgtatccctatttccacacctggtcgcgctgatcctttcccgtgcgtggcgcttggcagtcttacaagcgaaggctccggccgtcttgaccggcacattttgttcctgcgcgtggtggatgagtcttctccctgctggtctgggttactgacgatttcgcaatggggtcgtgtttcagctcggagtccgcgggggacgcggaacagaagaagcgaagtcaacagatcgaccgcaagctagaagaagattctaggcggctacgaagagaatgcaagattcttcttctgggtaggcattcgggtgttcgcttggaggagagctgatggttgactttaaactcgcgcaggatctggagaaagcggcaaatcaacgatcgtaaaacagatgaagatcatccaccaaaatggttacaccgtcgaagaacttgcgctgtaccgattgaccgtgtacaaaaatctgctggattgcgcaaaagcccttatcggagcataccactatctcaaactcgaaccgtccagccagaaggtgcaggattacattacatttctggaagagtacaacgtggacccggatcccaacactccgctcgattcgaaaatcggcgacgcgattacatatctctggaatgacccgtgtacatccacggttttggaacatcagaatgagttttatctgatggactcggcaccatagtaagtccacctatcgttatttccgatcgcaaggccgagttctaacctgtggtcagtttcttcgacgaagcgaaacgaataacggcccccgattacgtcccggatgtttcagatgtgctccgggctcggacgaagaccaccggtatatatgagacacgcttcacaatgggccaattgagcatacagtacgtgggaacagtcttgaacacgatttggaatagctctaaccagccacagcatgtttgatgtgggcggccagcgcagtgagcgaaagaagtggatccattgcttcgaaaacgtgacgtcgattatcttttgcgttgcgcttagtgaatatgatcaagtactactggaagaaagcaatcaggtatgaggctccacaccgaacgtactataccggagctgacagacttgcagaaccgtatgatggaaagtttggttctcttcgactccgtggtcaactctcgatggttcatgcggacaagtatcatccttttcctgaacaaagttgatttgttccgcttgaagctgccgcgatcaccgttgagcaattacttccccgattactcgggcggcaacgacgtgcaccgtgccgccaagtatttgctctggcgattcaaccaggtgaaccgagcgcacttgaacctatacccacagtgagttcacttgatcctacattgccagtttccacgcaccgtgatttttgacagctttctcttctcttagcctcacccaagcgactgatacctcgaatattcgtttggtcttcgcggcagtcaaagagactatcctacagaatgccttgaaagactcgggcattctatagccgttgaatatacaccgaaaacccagtcacacaagtgccctcataccgagtcatacgtatgcgcactttccctctcaactaaacttacgaccaatcaccgtcccttttctcaacgtcgctctcggtgtccctactaccctcttcaggagactgcctgaacagtttttaccatacccctttcgtcttcttttgcttcttttgctttttttctttttttcttttgaccagctgcaggtgttgatggcgcctttatggctttctcagctgacttcccaggcgctagttctggcctggggatatcccattttggtacttaatctggtttcctctatcaaatatgggtttatgttccataaaggtctcagtagcatgtttggaccgtcaaccaagctactgtttctgttccatgtgccctttccttcttgataagtcccggactgagcgtatgacaaccaacccagaaatgccaccgggcaagaacccggtagcgggactgaatactttccggactttcttcgtgtgctcgatattcctcacgaacccatcaccaatgggatttttttttccttgtctcccttgtcttcactgttgtatcttttctttgccttgtctcgaggcctgtttccagcccctcatgcataccagggctgttttcctattttcgacattgccatgtcctgctgatattactctattcctctaattcctcttctccgttttcctttatctgcgatctcttactcttctcctattacagctccctattgacctgggattcgattccaagcgcttccacgtctgatgctttttgttcgcttttgcttttgttctttattgctagcttgttcagcgttcttgtttcaacctcccgagaactcttacctatcttgcatggaccgatatcgggattgctgagcatttgccctatgccagatcgcggtcccccccggagccctggtcaggtggaacggagctgggattgggacgtgacacgggcttattatgtatagtgagcttcgagaatcaattctcctattcgagtgtgttgtccatactgtccctagatgtgcttagcatagatatcttttgggagtgaggacaggagtgatataaaaagtagaggaaccctctttataaagaactaagctatggaggaaatatattcttggcaaacctacaacgtccaaaccccgccccgacccatctcaccgccccaccactagagatttccccgatagatatcacaaggccccgcggactagaaccctcggaagcatacggccctatcgccgtgtaatgaatccaatgaatctaatgcatctggctaccccaggttcacgatcgagtcctggtactccagtagggctacaagcacggtacatacccgcttcatgcaatgcgtctgtgcgctggcatttgcggggtaggtttgcagtctaatgcgcccaagctggcatctaatcaccaaatcgtggcaaaacggagaagtcggcatgggctggatggttggtacggaagagctcgatagtttcgggcgatagatagctgatgtggagccgatgaagcccggaggagctgggcttctaggccctccaggccctgcggatttatattggccgttggagcatttccgggtcttttatgcgagcgccgatggacgtggcctgatgttgtctcgggcataaaaagtcacatgtacataactgcgacttggataatccgtcatgacgtacttctctctgcggtagcacgccagaaacaggcttcacgggacactactggccaaaaataactatggcgaggactggaatcagttagaggagtatccgaatattatttgaatattaatttgcatattaattcagaggcaacacccgaaaaaaaaagaaaatgtcggccggtgtcactccaaaagtcatgactacatcccctccccctcttttctttttaaagtagcttcctcttcaatcctcttttctttttcctgtactggactttctccagcttacagctctcccaccttcacctctttctctttccatcatgtcgacgaccaccccagatgcagctgcagctgcaccggcccaagcccaatcgaccctacctcgtcgggagcggagatcttcttccgtaggagctcccattgccgacctccagggtcctgtcggtccgggattcagtcgtcccaagcacaagcgcacattcactggccttgggcctgccgagattaagcatgtggaagctagcattcctgagccattaagagaggcgtgagtaccttccgcgagcacttgcttatagttgaactaaccaattctcgcagatggaggaaattcgtatgtggagaaaatcagggtatcgggatgcggggttccaagctaatacttggagtcaatttagtcgcctgctgaattcaccactaaagaagagttcgaggtaagtcccactggctttcgtacttgataccccagatctaacgcctcgcagacagatctcgtgcgccatatcgaaaccaccctcgctcgctcgctgtataattgcgatgagttgtatgtgttctgtgcacctcattcaagccgttcttgctgactggctttccatagggctgcgtactccggaaccgcgcttgcgtttagagaccggttgatcatcgagtggaacaagactcagcagcgtcagactttcaccgatcagaagcgaatctattgtatgtctccagcccggtgacagaagacaatggctaatccctgtagatttgtcgcttgagttcctcatgggacgtacattggacaatgccatgctgaatgttggcttgaaggatgtggctcgaggtaagcgctcagacaattgtgacctggaacgtcgctgatggtagcagagggattgagcgatctcggattccgcgtcgaggacgtcatcgaccaggagcacgatgcggcattgggcaacggtggtctaggacgcctggccgcgtgctttatggacagtatggcgaccctgaactaccccgcctggggatacggcttgcgttaccgctatggtatcttcaagcaggagattgtcgatggctaccaggttgaggttccagactactggctggatcacaatccttgggagttcccccgacacgaaatcacagtcgacatccagttctatggtaacgttaaaaagtaccaggatgaaaacggcaaaatcgtccactcgtgggaggatggtgaggttgttgaagccgtcgcatatgatgtccccattcccgggtatggcacgaagaccaccaacaaccttcgtctctggtctagcaaagccagtagcggagagtttgacttccagaagttcaatgctggagagtatgaaagcgcagtggcggaccagcagagggcggaaacaatctcagcggttctctacccaaatgataacctcgagcaaggaaaggagctgcgtctgaagcagcagtacttctggtgtgctgcctcgctgtttgatatcattcggcggttcaagaagacaaaacgcgcgtggggcgaatttcctgatcaggtcgccattcagcttaacgacacccacccttctcttgcaattgttgagttgcagcgcatcttgattgacaaggagggcttggagtgggatgaggcgtggggtatcgtgaccaagaccttcgggtatactaatcacactgtccttcctgaagcgttggagaaatggtctgtcccgttgatgcagaacctgcttccgcgtcacttgcaaattatttacgacattaatatgttcttcttgcaatctgtcgagaagcgattccccaaggatcgagatctcctgtcgcgcgtgtcgatcattgaagaatcgcaccccaagatggtgcgcatggcctacctggctatcattggctctcacaaggtcaacggtgtggccgagctgcactcaaaactgctcaagagcactctcttcaaagactttgtgacggtctgtggaccagaccgcttcactaatgtcaccaatggtatcaccccgagacgttggcttcaccaggccaaccccaggttgtctgcgttgattgcagagaagcttggaagctatgacttcctcacggacctcacaaagctagacaagctcgaggcctttatcaaagacaagcccttccgcaacgagtgggcggtcatcaagcgtgagaataagctgcgcctagctaaacatatcaaggccactacgggcttcgatgtcaaccccgatgccctctttgacgtgcaggtgaagcgtatccatgagtacaagcgccagcagctcaacatcttcggagtcatccaccgctacttgactatcaaggccatgtcagccgaagagaagaagaaggtggtgcctcgggtttccgtcttcggaggcaaggcagcccccggttattggatggcgaagactattatccatctcatcaacaaggtggccgatgtagtgaacaacgacccggaggttggcgatcttttgaaggttgtcttcatcgcggattacaacgtcagcaaggcggagattatctgccctgcttcggatatcagcgagcacatctccactgccggtaccgaaggcagcggcacgagcaacatgaagttcgtcctgaacggcggtctgatcattggaacctgcgatggagctaacgtaagtcttcttcacatatccaccttccattctgtactaacccaactcacagatcgaaatcacccgtgaaatcggcgaggagaacatcttcctcttcggcaatctcgccgaagacgtcgaggatttgcgtcaccgccacttctacggcgacttcaagctggaccctaatctggagcgtgtcttcgagacaatcagagacgacgtgttcggcaacagctctgacttctctgcgctcattagctccatcgatgagcacggcgactactacctcgtctcggatgacttcaactcctacatcaccacgcacgcgatgatcgacaaggccttcttgaataaggatgagtggctgaccaagtccattctctctgtcgcgcgcatgggattcttctctatggatcgcgtcactaatgagtacgctgatggtatctggaatatcgagcctctggttgttaaggactaaacacactttttgacaaaggcagtgctaagtctttcttcttttggtttgtcgtctcattgattaatgaactctacggctttggttgttatccttagcattaatagtatatcaatcattcttataagttagttatagaagtcatctagacatggtattcaagccattgaatagaacactttatatgcaattgctaaagaactaggtatatatacatctctatctcgacatacagaatatattacctcgaggcagtaatgactgatatcgaaaacacccactccatgccaaaccaagaaatctaaacataacatgaaaccataaaatacgtcaaaacccccaaatcgacaccctcactcctgaatcgtcggctcagtctgcctaggctccgagaaataatccggccaaagcgccatcttctcgtcccgggaaggcgtagccgtagccataagcgtaggaacctaaatcaccaccattagcaaaaaactctttcaatctttcaatcttctcttcaagggaccaaaaaacatacagcctccttactagaaatccgcctccacatgttcgcacgcgggttataccgcaccggcttccccacaccacccgtcttcctctgatcctccaaactaatcgcctcaacctctttcttaacatccgcaaagctatcaaacggcgtataagtgatcccatgctcgagacagtactcctcgagtctgagcccgcggcgcgcgaatagcacatcagcttcgcgggccgcggcgagatccgacacgccgtcgccgatgaagacgatcagcgggatctcgtccggctcgcattcggcttgggctttggtgcgggcttggtttacgctctcggctttgtcgtggcctgaggctgtattgtcgcgccagacgggtttccaagggataccgcctggggcttggaggtcgtttgcgacgatttggattgaggaggcctttatgtgggaagatgtgttagtgggtttttgaatggacgatttattgattttttgattgatggcggggattggtttttgacattacctctttctcgccgaggaagatgtctagcgtgcgctgcagaacgggctttaggcctgcgctgatcacgttgaaggggaagccctcgcggacgcagtactggtggaattctcggaagccagagtcgagttcgaggttcttttccattatgtcgaagccgtcgccgaaggggatgctgagggatccccacatgtcgtctgagatgtcgcggaaggttcgctcgccggttttgaattgttcttcgagtttgttgcggtaggctgcgccgcagccgaggttgtctactaggacgtggccggtgtcttggaggaagattgtgccgtcgaagtctaggggtgttagttttggggtgttctgggacttagggcttgtggttgggattggagggtagggaagagtttggggtatatgaatgggctttgcataccggagaagatgatgatctttctcttttggttgtcattatttgcctgtgatatagccattttgatatagactttagaagggtttgttctatagatagatggggtatgtggagggagtggtttggaaagatacgaagtgcaaatttaaaagaaatgaaacagacctgccaaagtcacgatcctaagtacaattcctgtagaacctggcatttagccatagcaaacaaggtagacaagaagtatgacgtaaggagatctaacgacatcagtgtgggccgctgagggggctcatctgcacatcgtgagaagtcgaggtgttaatatggggtataacagccgctgattggctggtcgtcaagggtccgcataatatcagtggaagccgaccgagtctttgatcggattggtcaatgtcattgtggatgcatgatacatcatacatttgtcaagtaaaatggtgcaaattaaaaaaaaaaaaactaagccgttaactcggcaacccgacgttccagttccggtacagcccgtaactgcaagtccaactcttccttctcactgcgagattgttaataaccgctcggcggaaaggaagggcggaaacttactcttcgagtttcaaccgccgctcccagtcaagactggtgaagatgtagccgccctgtccatcgaactgcaggatcttctggtgatacttccagagactgcgtcggtgcgagacagtcatgagagtaatgccaagtttcttggccgtctcgtacataatcttctcaatctccagcgtcaccgaggatgtacactcgtccaaaatggcaaacttgggtcggtgatagaacaaccgagccatagcgatgcgctgctgcagaccaccggatagtacgtcgcgccattcttcctctgcatcccagcctcccggacggtctacgacggacgcgatatcaaccactgataggatctcgtagagatcggcgtcagtgacacccttagcgcgcatctcgcgcactccatctgggtagatcacttgctgtcgcagggtcccacgagacagatatggtcgctggggaatgtagaaaatatcatggaaagggggttttttcaccgtacctccgtatactggccagagcccgcccaggatccggaaaagagacgatttgccgcacccgttgggtccgacgatcaggaggtggtcgccggggttaacggtgaaggaaagcttacgcaccaatacgtcgccgttcggggatacgatcggtacatcgatgaactcaattgcgtcgctttctaaaactttaccccgaccagacagcacctccgcattctctgccgtcgaagcggaagataccaacttcttctcgaaccttccagcaaggaggtcgtccatcacttccaataatgaggagacacgcgaagtgtagccagccagctctgagatttctttgtaggagaacatcaatcggccaaaagcatctgaggaggaaagcaacattcggcgattggtgacgaagcctgggagtcatcagaatttaaaaatccaataccaaagggcaacaacttactttcagtgtgatctgccatgctgtgggtagtctgaccggggatcttgaagaagacaggcacactacatagcaccaagcccatagctccccagaaatacttgatcacaaagtcctccatgaatccgtggtaaagtcgccggcgcagaatgcggttcacatgtttgatcagcgtgaaataacccttgtccagggtatccttctcggcctcgtggccgtggtaaagcgccacttcttcattgtactcaataagccgtgaatggaggaaacggaactccccctccagccgagcctcatcggcaacatatttgccaaatggtggagtcagcatacgcatgacgttggcggacaactgcactagcagactcatgatgaacagcccttcacctcccacgttcttggagagcgagtagttgtaaatagccatatcgagaatgggcttagctaaattggaatacagttctgctagactgtctgagaagcgggacacatcgaccgtgacaagttggtcgggattcttgattcgatcgtccaaggcggagatggcatagaaagtcatattagacagatacttctcgtggatatagtccgtgagacgcttgcggtagctgagagcaagcttgcactgatggtaggcgagctaatacggcgaaacatcaagtcagcaaatgtactgaacggtcgcatctagcaccggaaaccggagacttaccatagaattcgtaaaagtagcagggatagccacaatcatccaccaaacaagaccgagcaagaaatccttccccttaccgcgcaccaagttgctcacaagtcttccgtccagctcggcgacgtacaaactaagtatcgtccgcagcaccaggaagacggtgtggcttaccagcagccgtagctccttgctccgccatccgggtataacgatcttcaataaacggagcaagttcttgaagaattcccggttgatccccacgcgcttcttgcggggttgttcctcatcacctagactactggtgccgggccgtcggagcagctctacctgctgtgacgcggctttctgctcggagatggcattgtggattcgtttggcgagcgcggcaaagagggcgaggtatacggcacgtgagatattggttcggtttcgcaggtagagggatgttaggctggagaggatctgtttgatggagcgttcgggcggtagtagtttggactgagcggccatggcggagctattggatgcttatcagccagattcgggcgcatacatgtccgctgttgagtgagttgagggggtcgaagggttaggagttgaggagaaagaggctattgccatgacggaggtgacatgtgataccccaggaaactgggggagattcagccgaggaatccactttcaggtaatctcactggtctaaggtagtcaacaccatcttacttgtaatatatactcgaacgcatttaatgagaaaaatatacatagagatggggaattcattaattagaaagagtgatacagccctgaaacaaccacatgtatatacatatatgtagtcatgcagaaacggtaatgacaatgacactgaagatgccaatgataacaagattccgcccttctctcgtgcccgaaacgtatatacaaaagaacggggtgagtagataatactcaaagacatgcgctagtatgtacaggtttgataaaacgcaagcttgcagaagaatacataagggcgaagatcataaatcgagatgatataaatcaaaataagaaaacctaagacgaggatttgctctctggttcattgcggcctgtcctgggttctacctgatccctcggacggataccgctgttgatttgggcggcgatctgggcctgcttgaagcgctcgaatgcttcggtgtcttgctgctgagcagcgtagagttcgtcgacggtggtcccaagatggttaaaggccacgtcggcatcaaagtcatcgaattcagagagagactgctcatcgtggagaatatcaagcttttgccggagagcggcaatatgcgaactatcgtcctcgtattcgaaaggctcgtcgtcctctccaggaacaagagacgggttgaggaagtcgcggcggaggttctggccgatacggtgaatgtgtccttcttgggaggtcatggcccgagagtggagggaagttacggagctggtgcgagaatggcgaacggcatattggtccgtgtcttcctcgtcgaagcaattttcctcaagctggctgctgttcagattaccgctagcaaagaaggaactgcttccatcatcatcaccggagtgttgagagatggtgtcgggtacagtaacagtgggcgggagctgaggaacaatacgagtctctgggtattcgtcctcaaagcgttggatcatcttatgcaaggtcacgtccaaaaattgcaggcggccataattcgcgtcattacccgcacgatcttcgcgaataagagccgactggatccggactctgatattgcgcgcggattccagcagatttttcgacatgtcgcgaggccgcttagtaggaacagctcgggacctgcggcgtcggggcgtcgtggtaccactgggcggtagagattgctcaccaagaagatccagaccttgctggtccagattcccgagacaaacacccaatgctttgacgacacccgtgccaccaataacataatcctcgtcgggagcggcgtcatcatcatcatcataaggctcttcggaaataaccgagtggccgacaatatgctgtagaatgtctggatatgggatatcctcaagcgacgaagtagagccaggaagctcgactgcaatggcgccgccttccagattccgcagcgagtaagccacaatctgtgatcctagagctttgacaacttcgttgttttctgcgctgggaacatcgatatcgactgcaataattgtccgtgaaacacggacagctgtcatcatagacgcatacacagcgcatgcttcttcctgagcaacggggtctgtagtggacgccaactccacaatctgctgattctcaagaatgttcagatgacacaagctggggcactccggcaatacctcggcaagaccaatgacatgatccggtgacaagttgacgtcagcgagatggaagcgcttcaaagacggcatcttcggcaggaagcgacggaaagcccccagcgcgctaggctgcgaggagaataactcgcgattgtgagagaaatcaatgaaccgaaggttgtggatttgcgcaagcgattggagcaatggggaaatcaccgacgggttgagcgagcaatccgccagactcagcgcataaagcggtgtttcaggttcgatcgcggctgtgagtagatcaagatcatcctttatagcgttgccacctagatccaatccttcgcactgtccagctttgaggtactcgatcacatgctccagaccctctcttgtcagaccattgttcgcaaagccaagtcttcgtagacccattttggtggttgcctggcagatctgctttacagcgtcgaccgaaggataacactcgctcaaaagcagttcttcaagatgatccccagcaaagcgctctgccagggcattcgcaaagaccattcgcacgtcggccgtaggctgggattggctggttgggccacgaacatcgaccgcaacttggcctcgagggaaaggaatacctgacaaatcaatagatttcagagatttcgataggtgcacaaaaaggctcatgtggcgccatccttcccgtccaattttcgggttgtctttcagagaaagcttttccacaacaccgtatcgttcctgctcagtggagtctgaagattccggtcttcgcaatcgtctccgtcgatagcgcatctgctctaccgtcttggtggcaagcagagctgaaaggatggctcgcacagaagtatctgtcaatgcacaattttcaagaatgagttcacgaactggaacgaccgcgagccaatcgctgaatgttgtcaaatcctgtgaggtcatcggaaaattgctcagatccaaagccgctaccgtgccaggtgactcggccagtgttgatgaaggcttggagatctcgtcaaccactctcttgagaacaggcgtctcacgtagctggcaacaacggcgatatatgcgcactggatcggttgtcgggtgactttgcgttttgggccgagtgacacctggcgctggaccttgagaatactcttcgtcatcgtcattctctgcatcgagttgtaacggaattataccgttcgcgactgcctgtcttcgctttctctccttccgttccttccgttctgcctcagacctcttcttcctctcttgcttccttgtgtggtcaatcacttccccgtttggagcagggtcattagatggcttgctgctggtggtatttgtcggggtagagctagactgggccttcgcatcgccggtggccagagcaggagtcgaggacgcgctattcttatcagccaatgtagcctggggatgcttcaaagcaccagcttcgtcttggtccttcaatttgagatcagccttcttagacttatggttagtagcttcagttagaggctgaggctgtcgtaattgattggttggaggagctccctcgtcatcgtcccgatgggagacacccgcaatttcaacatccacacagaacgctacgcggttgagcttggcctggttcaagtccgcaatcttgcatcgttgccgatttttatcgacattcatcacgcgacgttgagagaccacgacattgggattcaacttgggcaacccacccgagttggacgagaacttgcgtagtgcattgtgaataaaggagggtgatttgggcgatgtcgaagtaaaggactcttctttcctctcttcttccctgtccctcaaagagtaggcagcgccgaatgggttatgcgtatcaatggttggggttgttttcggactcgctggaggggccttcagactaggttgagacggtggggtagtcccagatgagaacttcgagcttagactggagatccacgagtttcgtcgtccgatgggcttagggtctgtctttcgcggcgctggtgatggcgtagatggcttttgctcctcgctcttctcaattggttggggtttcgcttgtactggcgctacattattctggggggctggcttcggttctgcggtggagggggctggcgttgggcgtggtggcgggttgctgttggaacgagatcttcggtgtgacttaggttggggggtcgttggctctgcctgtgtaccaggcttatcgcttgctgatactgactttgtgcgagacaagtgatctaaagactcaagagtatcagaagctatcccgacttcagatctccaacaaccctatcctggggttggggatgtgctggcataaaaagtggaactcacctttttgcgaatgatgaagccagctcacgtccacagtctgaactccttccattttgaaatcactcgagagtcaagagacggaacaaagtaacttcgcaatgtccaggtggttgtcgaaggtttatcagcggtgtggcgtcgtataaagaacgcaatgactggataggactagacagaacgacgcataattggctggtcccccacttttcgctgataatcgcaaaacagttcgaaaggagaatcaggtggacaacactaggggcccgatgacaacgaataaggtggaaatgctgggaaatgcgggagatggaatatgccgtataatctgcgaccaagagctcgccagatgcgttaaatcactattacagtaaatgacaacccaacatcatcgcctgtttcagcaagagatacatggtgaaatcatgcgaggggttactaaaagggatagagaaagtggcattggagaacttccgaatgcacaattaagcatagactaaggtgacataatcggggggagggggcacgtgagtgttctcattgggggagttaatataattggagtagaagggttggcgattggaccaatccggagaatgttcggctctccggtggcggaggacacaagaaccatggagaacaacatgtctacggagtacattattataaatcgtggagtttacggtggattagccgggagagccggggtgttagaaaggagtttggtttcgtaaaaaagggggaggatactggtgtcgaacaccataacgctcaatacgggtatccgcgatgatagaaacacctaaaaacgccaccatgtcctgggggaaaaacggccgggcagagacaacaaagaaaaagaaaaaaacctcccccacgcaaacccctcggaggggtagttatgcgatgaaaagaaacagtcatcacggcgtcaagcggacctcgggaactagggatattccgccgcacacaagcccctatctattccagacccggaatattcttgagatattcccagccatactcctcgtcgggtttctcggcttccatgccgagcgcaaagcggtaggcacgaacttcattctgcagaccagagatgacgcgagtagggacatcatcttcttcgcatttgagacggtaggcggtgcgaatcatttcggcacatttcatggtttgagcatgccagtagtcccggtcgagtcggctttccagatgggcgtcacgctcagcttggaggagattgttgtaatgcttcttctgagcaaggtagtgcatgttgttgttctggcagtaattgcggatttgctcgagcatgatacccacggcgtgctcaaactcccggaccatcttcatgttttcctcacgatggtatttatgatcggcactcacaagtttttccttggccagggcacgctcaagttcggcaatccgggcagctgctttaggcgttagtaaacgaagatgtgatcaatattcctaaggacatactaagattgtcaccctgctggccattcgggccagagctatcgacaataccgttcttctaaatgtgtgttagctatatatccaatctgagcaactcgaatgcatgttggcccacataccacaatctcctcggcattcgcgacgatgttcttggtcacatcccggttattcttcaagacgtcgctcagttccacaaccatctcatagagatgatgcaagtccatctgatggccagcgttcatcggaattgccgcacccatggcgcccattccgccgccattgatctggccgctgaccgaagtgtgggaaggggaaggagacggagtttggcgaggaggcatgttggatatgctcatcgcgctactactgttttcgacgtaacctgagaagttgccgttaccgttaccgttggtggccatactagacgtgttcgtgttcatagagacgtcggcgtcggcgaaagcgcgattcagttcctcgagttgagggtcgtcaggagtgaaggatttcggagtgctagtgccgttatcttcgtcgaaccaagaggcgtgattttccacgcctaggacctccgattgaaacttctcaaggtcacggcgagtaacgtgcgtggagcgacggcgatgcccacgcgtgaaagccttggaaggggagggggaagtgtcgccctcgatggtggcgggtgcactcaaaccagggacagtatcgtcactgtcactcgagtctgaatcgatagcaatctcatccacggagctctgatcagattcacaggtttctagtaggcagttgacaagcgtgttgtgctgggagctcacgctagcaggtggggctagcgacgggtcaacacgtgattggggtagctcacgtgatggtcccattccaacaagctccctcgtcttctcgagagcactcattcggatagaaaataagaactatgtggctgcaaagaaaatcaacaaaaaaaagtcatctaggaaagttggtttcccaacatatcggtggggcgaagcctatttctttccgaccggacaagtgtgtaagtgtaatggatcaatgacggtcgagagttggagagaaaacgggctctcgcccagtatgaaatgctcaaatttgctccggtccaatcacacgtgctctctgaagtctataattcaattcctgcagtcatacttggcacgtacttgccgttctcatgttttttgttgacatccatgaatgatgaggctggctatactagtgtcgccctgatggaaggtacatatggcaatattgaaacattgtagctagggcaacgtgctcgaaatccaagtagaaaattaaggaagctaccatcgaggcattggcaatgtgtaatcgtgtagtattgtatgcacatgtgggcatggggtattatagtttcgtcaaggcatatccaacagggcttgcaatctctgatcagaggctggaagtgagtaatcgtgagtttcaagggcaccgctgcttcttttctgttgtgcaatccggcctccaactctggctacgagcatgcgcattttctccaattcttgaacaagttctccatctttagtaataagattgggttgaatgtccttttggggatcttcaaatggctcgagtaatcgtcgaagatgttgcaactgatcaagccgccgttgccgttgctgcctttgactgtcgaggctcgcgagacgttcacggagctggaggtatctgtgcgacttggtgtaaggctggtggaacttcaatcagagaaaatccggatgtgtttgtaaactgaccttgcctgatcctcttcgcttgcttcctggctttccaatatgacaggcatctttgtgatgttcctaaatcattgtcagtgttgtcataccttgtatagagatggatggaaacgtacatcccccttgacaaatccgttgttttttcaatacctcgagcaaaagcatcccgacttcttgcctcttgactaaccgaagaccagtacaagtttgcaatctgttgggcgacatggtgtatcgcttgggaggaataaacaacgcgattgtgctgcttagcagctgcatttactatagtgctatgagtatcgtattcatcttgtgtatatgggcgcaaatccgtaaagaattgtgctgttcaattgtgatttgtgttctgacctttgtgtaggacatcttcaatgaccttgtcactcagatcaccttctgtggtttcagcagcatagtttcgccagtcttcgggtaaatcgaggctctcggagaaaatacggacttggctccagataaacgcagatttcaactcagatacagttcgagttgaatccatatcgaacaaaatccaatggtgttagagaagtaccattgttgattctccaaaagtcccgcgatcttctctgagcacgaccttatcgataagacatcacgtgtctctccataaatacgattttgcgggatggacaataacgatttgggtaatagaccacgataaaataagggaaaggatttaaagggtaacaattgaataatggtttgatctttcatacatgatcttagtagggtaataatgggaattcttggtgtggagtatatcctcggtctagagtgtatgtacctcggcaatctaaccgtccagatcgctttcaaagtatgtaatccaattcgtgcaattcccatcacaactcatttaatttacgagttagaaataaactgcagcatatcttgcagtgacccctatcatcactagcagcctccttcattatcatctcaagatggcagagatcaagcgaccggtgggcttactgttcgacgttggaggagtgtgtgtaagtcggccacttgacccataaattaaagatacatatctgacgaatctctaggttgcatccccgctacaagctattcttgactatgagattatccgaaacatcccatcaggatggatcaatttcagtatctcgcgaaccgcgcccaacggtagctggcacaagctcgagcgaggcgacatcggggtggacacggacttctttgcggggttcaatgcggacctggcaagcccggaactatgggcgcaattccaacagcaacttcaaaagaaacaaggcacaaatggttctaccattcctccaatgccgacggtggatgcagaatggctattctgggagatgatgcgggtatctcgcacgacagacccctatatttacccagctctgaagaaattgagagagtcaggacagttcctgatgggcgctctatccaacaccattatattccccgacggacatgaatacaatgaagcatccgaagtgaagaagcaattcgatttcttcatctcgtctgcgcacacgggcctccgcaaacctgaccccaaaatttaccaggtggcgttgcaggagatggacaatttagctaagagacgaggactagccggagctaatcccgacgatgttgtgttcttcgatgacattggcgagaacctgaagggggcgaagaacgctggcatgcgtacagtcaaagtcatacttggaaagacccaagatgcggtcaaggagctggagaagctcacaggccttcagttgctggaggaggacaaggcacgattgtgaggcgttatacatagaagtttgttatttcaagaagaatatcggaattatatgtagaaaggatgaaggattaagaattctatatcattttcttaattttcccaatttttccccattttcctgaattaattgtcgttgtttcttgtctttcccatggttaagaagttgatgttcactcgtcgccgacctcattttctggcgggggatgcagccacacgctaagcgaaatcccgcacaaagtcgacccacgaaaatttcccacttcctcttcttcgtccatctccagcgcccctcgacaccccgtcaaaatggtgagttcgatcgctgatggctgaaaaagccattatgcattccttttgcattttatttcctctccgattcccatcggagccgggtccctgcaagttgcttcggcgtaatttctgaagcgttaattgctgactcgcgatggtttacagcctttcaccaagaacgtgaagtccaacgcctacttcaggtgagttcaatccttttatcctgtgctaatcttttgggattttctgtttgctaacttgttttcaattatagtcgcttccagactaagtaccgtcgccgccgcgagggtaagaccgactactatgctcgcaagcgcctgatcacccaggccaagaacaagtacaacgcgcccaagtaccgcatggttgttcgcttcaccaaccgcgacatcatcacccagatcgtctactccgaggtcaccggtgacaaggttcttgcctctgcctacgcccacgagctccccaagtacggcatcgaccagggtcttaccaactgggctgctgcctacgccaccggtctgctccttgcccgtcgtgttctcaagaagctcaaccttgacgagcagttcaagggtgtcgaggaggctaccggtgagcactccctcaccgaggccatccagaccgatgatggcgagcgccgccccttcaaggccttcctcgatgttggtcttgtccgtacctccaccggtaaccgtgtcttcgctgccatgaagggtgcctccgacggtggtatcttcatcccccactccgaccgccgtttccccggttacgacatcgagtccgaggagctcgacgccgagaccctcaagaactacatccacggttcccacgtctccgagtacatggagaacttggctgatgaggatgaggagcgctacaagtcccagttcgtcaagtacatcgagaacgagattgacgctggtgacctcgaggagatctacgccgatgcccacaaggccatccgtgaggaccccttcaaggccgatgaggatgccggtcccaagaagaccaaggaggagtggaaggccgagtccaagaagtacaaggtcaaccgtctcacccacgccgagcgcaaggctcgcgtcgaggagaagatccgcaagcttgccgcataagcgtctcgcttcttatctttacgaccaaaagttcctaccaatatttcaattgagggaataggctactgccggcgttctattcatgtgatgtagtttttgacggatcatggcacataccactttttatttttactatcggaagggggttttttcctgggagcaattagttcggtgttattccaaggcaatttctttactcagttctaactgctccccaatgtccatctgtcttgttccctcatttgcctccttgcatttgcctgtagctgggacctttatagtgtagttgaacccactttccatcttgtaactattcttagtattgtgttatgcaggcgatattctgtttattctgatcattatgtttatgcacgtaattcttcgtaattacatcatgccattgtggttcgtcccaggttaaaattagatcgacgccatgcacacaagcgccaatgccgatatgataagtggctcccaaccccacgagtgcgttgccagcgcagcaacttagtggctgttcaatgagcaaggatcaccccaaaaaataaaaaagagcgctagatcgttccattgcctgccatcaatctccgctttaaggggccgttggatccccgaaaagatgaacctgcaattatttcacctcttgtatatatatcccccacctacataatctacacatcccaccatgaagagataccagcaacacacccacgcaagttggcaccgcgcctacacaggcaaattcgattgcccctggtgccaaaacactcaccggccagagagcacaacaccccagagcccgaaccacaacacccgcaaacccgcacaggcacaggactcagacaatggcaggtccagcagagcgaatgcgactccgacacctgtaggacaacggatagctcccgagagccccgagagccccgagagccccgagagccctgagagctccgacgttcctgttgaagagcaggctgctggcacaccgcccgaaccgcagaccccagagtcggctccagagtcggctccggacgtgaacgacgaagagacaccagagccggaatccgagtcaacttatacgccgtttaatatgggacggacctcgaggcacgggaataacgcgtcgcgtccgccgcttcccgaggagtggacgaaggaggttgaggatcaggaacatgggtaggagattctagctgatggctttggtcaccgctggttcgtcactgtgctgacgtgtttttttttcgatagtgctgcggaatggaatccaccgactgtggaaacttagcgctttgggctagatacgttctagggagtctcgaatgcccggcaaccacattgactctcctagaggagtctcgagaaagacttggttggaatacatcgagtcgaaacattcacattaaactacagatatcaggatcttgcttcgcacaagtttctattgtacataatttcaccaatctattttgactctaatcatacccccttggcctatcgtcatcagcagtcaactcgcttgatatttcgcaaatggcctccggcgttaagttcagtcctgcatcttgcaaggtagcggatcgtctgggcccgttcttccgtacattcctcgaggaggcgcgtggtttgagaactattccgcggtagttgattaatgagagatttagccaactcatagtcgcctgccgactcggtttctgtggaattcacccatgccatttaaggttcgtatgagtcgtcatcatcatcaatcatcagcctgggccaccagtgaacactctgcctcgtcaatgtcaccgagagcctgttatgcactgcactccaatgctttaatggcttctttgttatcttcactcgatcccttgcgtaggatagctttggccttatcgtaccctttgattagctctgctcgtgccttgtctaacaagttgagttctttgtcgatatctggacgccgagatcgaggttgaggccgaggtttccatcccagaccaggggcagaaccagaaccagcgtcatcatcggagttggattgaaatcctgttggcttagctcgagcggggtttgcgtaccaaaccttgtcacgagcaccgcgcatttctgcagccataatctggaataccttgcgaaaatcatcgggtttttcccagagaacacctatccttctctggttggcgcgaagcaacccacgatagtgaccaattctctgcgggttgccagacatttctgcatccgaaagctcgttgtcaagtctcacttgctcaaggcgtggatcggagtagtcttttatgatctggtcaatcaagtcacatggatcgagttcttcgtaagcccatgatatccgtattcgactgaattgcaatgccgacaaaaggaaactggggtcctcgcccttaatgctagacagtttagacttggccatagcccagtcttccttcaactcagcttccttggattgcttttcaagctctttgttagtgcggatttgagtttcgcgacagacgtccaaagccttgaggagaggttcgaggattttcttgtcagggatctgaagcagcagagacttggctttatcataatcatattgctcttttgcttcctggatcttcgctataaggtcttgcgcagactctgtcgtgaccaaaggttgagtatgtatgctgacagaagagctagccgggacgctagccgggccgttatgtcggggtcgcgaggcatgatgtgtaggcaaatcgtctgtcgacagggataacatgttagtatgtcctaataacactccacagcaatgatacaacataccatccgaacttatctcgacatcgaacccagtctgtgagaatgttcgcttcgcagcgccctgcgcaagaatgatttctaccgggattttaggtaatccattcacatagctttgcccagaaagtcttcctgcttggccttgaaccactggcgaccgcgaactcgattgagccatgttgcttcggttcggatgactgatggcatgtatatgggaacgtaattcatctatgagtggtgccagttgaggtccacgatcacacgaagcctgggaacgtaactttgtttgtaccagcgtcctgacacgtttccagtgccagcccgaaacctcccaaaattgatcagcaacacgatgccagaagtcgagattgccttgcgattttgtgtaacggcttttgtgcacaatgcagatttgaaacagaactagctgctgatcaaggctcagcgacggcaattcaggtcggtcccgctgatactctcggatcaccgtccaattaggggtcataatgcatgggtcgcgaggtattgcaggcagtgacgatgaggatgggctagtgcctggacaaccacggggctctacctgcgtagtttctgacggagggttctcagcaatgtggccttccccagcttgacttcgagatgcagttggtgatcgcatggtcggagctggcagacagtaccatgccctgtcgtaggtatcgcgcatatcttcagccatcatctcgaacaccttgcggaaatcatcgggctcgctccagagaacaccagttccaaacatcttttccccaacaaaaagactatgcaggtcggtggctctctctgggggcccattccgttctgcatgttcaaagtactgtgtgaatttcacctgttcaaggcgagcatcggggtatttcttctgaagctgaacaagtatttccatgtgctcgtctttgtgcgtcaaacgtgcctcactgtatgccaatgccgcaagaaggaatttgccgaaatcgcttttgatacgagataggagagacttcgccccctcccagtcacccttcatctctgcctctttggcttgtttttctaaatccttgtccgcctcgtaaaatgctgatcgctccgcttccaattttctgaggagtggtccggacaccgtcttcttcggaatcaggagcagcaacctcttggcttcattccagtcaccgcacaatgattcttctttgcttcgtttttggaattcaatgtcggcatcacttaacggttcctcgggctgtagcaagctcacgacttcaacatggccatcgcacctctctgtactgacgccggctgatgagttcaagaggattcgtccaaagttctcgccatccacttttagacgcagagatagagaagtggctttatcttggtcctcattgtgcagggcttccgcgaggtccactatgggctctaatgccatatgaaccgatgccagttgtggatctgaaagtatagacttcgcgccgctaaagtcacccttagccaaagcctcgttgcacttgaataatgccactaatgctttgggcctcttgcctttcatcagagacaccagatcacaggccttagtcaagtcacgatcaacaaattgcgccaatacagtctcttcttgaaggcttctgttgtatttgttttgtatggcttgtctcctttccaacgcgacaaggagccggcccgatctcaccttgttctccattgaaagcagcgaggatttggctttctcccattcaccatcactctctgctttagcgctttccatttcgcgctgcttctctatttgctcatgtagacttttattagactcaaattccttgatgtatgattctggtttttggttgtctttgaattgaagcaggagccacttggcctgatcaaagtcacagcgcattgctgcggacttgacccgctccaatatggcttcttcgacgtcttgccaagtcatatccaaatcagattgaggaagaggcgttggagatcggtatctgtaatcggagcgtctcagctccgaccgccatttgatgaaactgatgtgttccatcatttcccataaaagtgattccatccggtaaccatcagggtcgacagggcgaacagtgtgatcccgatagcggtattctgagagctttttttgaacaaaggacctgacccgttcttcatgccagccagaggcagcatggaaatcatcggtaacagagaaccaaaaggtaagattcgaggacagccgcgtgtataaatgtttgtaccgtatgcatattcgaaggagagctaccggcgaaggctgggagccctgtgaaactgatggagaagtgtcccaattcctttccttttccatgtgccggactgcgtactccagatcacgtctccacatcgttgaagggaatgatacagagtactcggtactgccgacggagataggattcagcctagtacgtcggagatgaattaacatacgtagaagtgacaagggatatttttatactgggtaactaacttggtatagctgtctggtctgacatgaggacaatgcgacaggggtggaagcaaaacccagttaagcgacggttggaatgtgcggaggaagatacgcgacatgcgacgcgacgcggtgacccgacctatagtcactctaggaaggagtctagggactggacggtctactccttatcggagattggtctagggtaaaaaaatgcgactgttcatgcggagaatacatttttgaaaaaccacagttgaagtccaactggaaatcgcggtctttaggaccctaatgcaggtacgtctatgatacccactggagagctgtatcctttcgccattaaccgcctactcttattttttagttctcgctattaacatttaggcttggagagaataggaaataaaaacttatagtataggaaaatcaggttaaattcggtggagaagacgggaccttggagatgggactagggactaagatattcccataggagtcctatatagatctctacagatgactaggaactctatccgcctctttccgaattattttcaaattgtcaaggaaacatcacatatttccaatccgaaagagctagagaattgcccatgcaaagcccgcttgtcagtagccttaaaacttgctactcagtgactgcagttgcaacaagccttgcttcttggaaggttcctcgacgagagcaacattacggacgttgtctgctaaaggaaacatatatctcccgacatccacgcttgtaggccacgacgctgcccggaatgcagcttccgctagctttatgagcattagatcgcttccctttgcaccgaggatagtgctcccgatcggtcggtgttcaagtcttcctgagattcgtgattgatagggcatttgtccaactagagacgatcagtaatttactccggaattgtggccaggaaatgagaagaaagaagaggataagcactgaaagtactgacaaggtagcacaagctgagggattccaaggacaggagagatgaatttttcaccaatagttccagcactcgatgggctcctaggtctagtcagttctcaagaaatggaaaacccggggaatggggaacgactcattagcgatatcccggtacttcgggttagcagatccatatggcataatcataatggcatcagacagggtgtttggatcttgtgagaagatgttttcgtcaaaccatctctggaatactttcagttcttcacggtatgcattgtactcatccagagtaacttctttgccaactcccctaacacatttccggttagcttttctccactcggtaaatttcatatcttaccatctgtaacgcaaaactgggccttcaaaagggagtttctcatatttagattcatacttcgatcggaagtcgtcaaatccgtgatagtaatcatagcacatagaccagaacgcactctgtgtaagctaatgtaagtttcacatcgcttcgaactggtgaatgactggattaccaaccttggacaggtactgcttcagtggcttcccgttcgcctccaatggagggcacttttcccatctctcagcgatactaatctcgacccgcttagtgcccaaaaagttctcgaggatttcaacaaattcatccaccatagcttggtgctgggggttgctgtgggggaaaaagtcgagtggatagatgatcttcgacggaaatgccgtagagttgtcgttgagatccaaagtatgagaggcaatataatggagatctgacaagcttcggccgaataatcccacaacatcgaagtgactggttatgaatgaatcagagaagtcatgtggaagaattgactagaaactcacggtgaattcaaaactataccatccatagacgttgattcagtagatggtctgatggaaaatagcccattgcaagttgcaggtgccctaatactcccagcagctggagtttcaaatatcaatgtctttggttcgaacttggactccgggtttgaaaaagaaagacttacagtcaccaccaacagaagaatctagccacgagtatcctgctaatgctgcagctgaaccagaggagctccccgacgggctctggtattcgtcgccacgggggtttatggggcaatggaaatcaacccactgatccgtaggctcatcagaggatgcaaattgagtcatctttgtctttccaacaatgatcgctccttggtcaataagcttctgaacgtatgaggcagtcttctcttgaggagggtacagttctgtatatgcacgactcatcatggtcgtttttgttccgttgaggtggaatatatctttcaagcagacccgaatacctgcaagcgggcgttctggcgagacacgtgaatagaggcgactaggcactgcgacttctttccaaatcccgtcatcactgatagaactgaaaggattgaacctaatattgcttgttagagaataaaccgttcgctttcgccgcactcttctgttgtgaccttgagaacaaacctttcgggctggagaacattttccggcaagactccaaaaatgaacgcgtcgagacaatccgggtataggcgccaggcttggtgaatattggagccatgaagaaaataagggcccgctggcaggtcgagcgcgctggacgtgtacactgtcgaaaatttctgagatactaaggtggatttaccctgattcagttcttcaggagtgccggttaggactattgaacgtgagaattctctgttgtagacatcgtctacctgttcaaagagattcagttgctgcataagtctttcagtgttttcttgcactatctttgcctcaagaagaacaacagctttggtctcttggacgtgaatattttcaagaatagtgccctataagaacagctcaatataatcctccttaggatatagacgaaagcttaccagtgcctgtgggtgtacgagatatttagtactcgcaattatttgcgttataatctgatcaaaccccatctcagctatggggtgcggaggcgcgcaaagtggggataattggggataattgacttgaaggatagagaaaaaaaggaaggttgaaatattcaatgaatttgacacagtgctaaaggtcttttcgggactaaataggcgtaacgcggaagctcttagatggagggggtcgagtctgcccaacgaggctgatctcggtgtaagaaaaggcctagaaaatgtggcatgctgcacaataatctcaattcgtcccatcttatgtgcatgtgatagtactggctagcagacttgtttattaccggccgatatgggaataatggcgggacatcctatcctgtgacatctcgggtttagggctgcaggtggtgctcgaagaagttagccagcctcttctgattggactactatagccacgcagcaaatgttcacagcccccctcgtaatatacaaggatgtgctttcaaatataccctgtcactgcccaatctcatgcgtagcgcccgaaggcgatgcgaacaaaccggaggctcaaacagtcctttcagcgtctggactttgttatgcggtctctttctccctctcccgctctatctctagccataaaatcaaagccctccaagggagcaaagactaggctaaagttgctctgtgttaatcactgaatttggggtatcccaaggtcgtcagtcccaccggaactatgattgctcccctttcggttgtctacgacggtgtcagaaagcctgagattgagtaagttctcctctgttagaaaagaagttttgtcgaataaactaaataaaataataatagccttgtctcaattccgggccttccaactatccatcctacgtacaagttgaaagaccacacgaaatggcttcgggaagtactgagccatcaggtgccccaagcgcgaatcatggcatttcagtatgattttgcaaaggattcaatggaagtctcctgggcggaactatttcgaaatgttgaatacctactatacagtttggtacatcggcgcgagggcacagaagaccggcctgtcttattcatctgctacagctttggggcaatcatcctcaagaaggcaagtcacaagtagattatttattccacctccataattcgtagctaacattatgtatttcttgatcaaggctttgttgatcgcaaagaaaaccccgatattccgaaacattctcgacaagaccaggggtatcatattccttggctgtctgaacgatgaatcaaatccacaaatcgaggagctatgtcttaaatgcgctgcggtggagctaggagtgatcatgaagaacaagatgatcgacaccctgcgaaaaacggacgattggacaataattcgagacgtgatagagagcttccgcgttttgagatgccggttcccggtacgcaacctctacgaactcaggccgactaacattatgagccgtacactcggagtcaagaaagtaaagcgagaaatggtagctttcacccgagattaagtgtccaggttgatgaagctgatgagctaacattggtcaaagctatgcgatttacgggtatcgtccttaggttggtctgatgaggattgcgtgggcattgaaaaggatcatggggaactcacaatgtatccactcagaagcgatgaagatggatatttcgagacatttatgcgcacactcacgagaatgatcgatgagattgtcccaaggccaacgcaacaagcatgggaaagaaatgatcccgacgacgaccaaaactggcttgtgatggaaggaacttctagcaaccggtctgcgaatctggagggtatgttaaccctcaaaccatgttattttcaatatcttatctgacatatttatctccctgctacctttagctgatatcacaaagtcgatgttgtcgtataacgactcagcttcatttcacacatcacatggtactcatataccatgttatgtcatgaccccgtttgaagataatcccaatttcgttggaagagaaaaaactctcactgccatacacgatgccttggccccaggtagtcctagcgtcggacaaagggtattcgcacttacaggcttaggcggaatggggaaaacccagacagcagtacgttatgccttttcacagatggaagtgacctacaagattgtgctatgggcacacgcagacgggcagtccaaactttcagagagcttctctcttttcgcttccgagctgggtctgggagatggattgacccacgcaaaagccaagcaagcggtcaaagactacctcgcgattgtcggtaggagctatcaattgaaaccactattgattctgatctgacccttaatctagatgtggactggctcatgatttttgacaatgctgatggtgatgataagacggaactgctagcagaattttggccccgaggtgacaaagggtctatactaatcactagccgcgacaaaactttgacaaatcggtaccatgggagattcttaaaggagcttcattcaaaaaacgccgtggatcttctgctgaaactcactggaatgcccaccactaccacagaagagagacttgcagcccgcgaaattgtcaagagagtaggcttcctaccactaggaataaaccaggctgcaaatttgatcataaatctctcatgcactttctccgaattccttggagcatacgacttgcaagagctcattgaagactcgtctgatgtccagctcatatcggggggttcttacaagtactcgcttcgaacggtttggaacatgaacttcgagaagcttagtagtgcggaccaagctctgctgaagatgatctcgtttcttgaccccgatcgcattcaaatgaagttgctcctggaaggaggagcagagagcgcgaatccaaacctgcacttcattaatacttcttacaaagtgaccaaatgccgggcagggcttttgcgcagctctctgatctcgcaaaatgaacgaaaagatgagcttcagatgcatcgtctcgtacaagcatactgccaactcaaagtgtcaccagaagaagcacaacaaagttttggcaatgcaatctcgctcgtgaaacaagtctggccagtcccgcctcgatcagaggtgcataatccatctttatgggagagacaaagagctcttctgccacatgttcaaaagttatgtgagttttacgtggcatcttgccgaagagaccagcctcttatcccaaaagacgtcgtgaattgggactttccttccgtggtatacgaggcaagctggtgagaaaagaaactcttaggcttgaaagtagcaactaattaattcaacattcaggttctgctacgagagtgggatgctagagtctgtttcagacttgctgaatcccgcgaaggattactgtatccaacatttggcttctggaaggggttatcgcctgttggcagatatatatgggtgcttcggatctctatgcacagagtcaaaccaatttcaaggcgcctacgataacttcgccactgaatggaaatatctcgagaaagctttcgaagcaggggagcttgaaagaccaagtatttgggaagtctttggtttagggaggcttggaaacgggcaccatgggctgcatcaatatgcagaagcagaagcatactatcgaaaggcattggccgcctgggaaaatcttccaggtgataagaagctctggcacagtcatcttgcaacgtgtttgtggttacaaggtcgcccagatgaaggagaggtagtcgtgcgaggagtcatcaaagacgaaaatgacacaaccaatttcaggtaggacctagagttcacccctggagaccatcggtattcagtgctaatgcatgaagcctttagaactgcaatggcaatgtatgcactaggcaatattcaaattgcccaagctacaggtttgacactcgaaggaaagaaaaaggacgccgaagataagctagctgaggcaatgaatacccatgtcaaagtactcaatttgtggacgaagacattgggaccaagacaccacaagacctcggatgcaatgtacaaggtcggctggcatttgcacagacgccaggaatatgcccaggcattgtcagtctctatcgttatttctcgcctcgatggcctttctgcgtgcagtactgactaattgaattagggacatgttcgagagagcgttggatatctatgaaagtcagccgcatctatacaaaaacgaaattgcccgaacgaaatacaagataggctgcctgaagcaggatacacagcatcatagtgacggtgcagctttgatccgcgaagcggaccgaatcagacagcagatagtgccgccagaagactgggagcctgcgaagtgcgaggaggactttgacaatatagtccagttctggacacgataaatttgagagaaatggagttcggcagtcacaaaaggtcgcagcagagaataataggtcaaattgtaagagcaggtggcaagtgggaaatctgaattatctatcattcatgcccaatctctatcgtcgaaacttccatatatcggcagtaacatgataattcttgatctttctaatccattctggtccgtaaagaacagaaagagtcaaaagataaatccctattccacagccaaaaggccattgccatgacggaggaggggaccattcccgtatattcatgccgaagacaccagtaatgaagctcaacggaataaaaaatgatgccattctggttagcatattaacctcatttgcactttgcacccctctttccgagagcacaagctgtgcaaatccaaccagaacgcttgtggccgactcgcaatgaccagtcaaaagtttgcagcgttccatcattcgatcatagtctgcttgtagttttctttgaatgagttcttttcgttttatcgtggagtcggaagctggctttggccaagatgagcaacctccttcagtaataatgtgctggttttccgagagaagttccttgacccggcttatggtagcaacatgttgcctaagctgacccaactggaactgtagcttatcttgatcgacgtccagctgatcttggcattccgtaataccttgggcaagaacattcaaggtctgtgaccaggaaagaaatgacgtggtcagaaccgtggcaaggaggaagaatggatcttcttgcattaactgatagtccacctgatccctaagaactatgcctttgaggggatgaaactggtctagctgtccggatgattcaccatcatctctgctagggatcggtgcgctactctctgctggcagattgtaaggcaccaatgggacaataccaccatgtctagaccatggcagcccttgttccgtgaccattcggctactgtcagtcagaaatatgcctaaatttttgattagctcttagagaccttcatgaatactcaagctccaggccccactcaccatgccaattattccggtgcgtcgcaatagtgaaggacaccatctcctccacactgcatatgtcactatcatgcacaacaatctttcggacatgtgtggccccatacattctgtgattgaccaatgccttctcatagttgagccgcaggccctccatctcagctcgtttctgacgcatatgcagcgatgtttgaccggaaagacgggacgggtaaggagacatgggtttgacgaggcgggaaaagtgcacgcgcaccacattatcctgtcttgacggcagagttggtaactctggaacgctgtcactcagcttgaggctgacaggtaggtgctcgataaagaattctgggcggacggcaaactcggctcccagaaatgcgatgcagtcaggatgtgggaacccttgcaataccccaatacgtggcttgcagttttcatcatgcagcccagtagtgatgaacgggaaagcttttggatatacgtcatcattggagagcgggctaatctcaaataatttgacctcctgaagtctggactttcgttgcccggaacatgcatcaagaaagtccgccagctgttcgtagaaggaagctgcttctgggtgataccgataacaagatcggatatggcgtagataaacagaacggtcgtcggtgctgcttgacatgcttgagtatatgtcgaagtaggaataagccataaacaggaacttggtttttgttatgttctagtggtaaaatgcgctgcatggtttccgtcagtatatacaaaggcttcgagggctttgtctttgtccactaggtaaaaatatccaagatacctagcgttgaagttcagtagtggtgccaatctactcttgtttctcgtatatatttaattggcttccgggcagtgcaatcaatatattaaagtcagccactatcccactgccaccttcacccgggcatagttacgcccaccacatgtatgagttcaccaataatacatggctcccgtacaccttcccctctttcccctctttcccaatgaaattgttgatcgtctgagcgataacatcgcttcactttcgtgatggtaggtcttctccacctgctgtcgagagtagataaatagtggtgcaagcacagggctgatttacttttggcctatttgggaatcactaccatcttctcttccaatcactctactcgagattccttgaatcttgcttcactgcgcagaattcgccatccaagggtacttgatcgcaacaatgcatccacatgtggtacgcttactctagacatatggtgatatctagtaattctgacaacagctatttcagactcagcttgtctcaagcggcacggagtataccgacactcacgtcaaatcctgggctcaggatatcctgaataaggcatcgcaagatactcgccaacagccgtggaagcgtgcttttgccgcaaaagaagtcaatgttttgtccccgcaggtggccgatatcattaaatttgaccacaggagcgcctgtgctaacgctgaggctggaaactgagatatgatttagatagctatcatcaaaggggttggatgaagcattactatttagtcacttgaagtccgttgaatgtgagattggaatatgtagcaaacgtgagttgcctagttaatatgccagttcaatctatatgctgatttccattcttttgtgttttggtccaataaatccccggataaggctcaagtgaccacgtgtaaagttataaattaaccgtctccccccagggccgatgaatgccaaagccaaccttggaactattccaacgcttaataagcagatctgtcgtccaatcatctataagagtcatggagagaggcatatttcgctatctcaagtggcaggagctatacaaggttgaaaaacctttccaggtcctcattgatttgcctgaggatgctgaactgaagcggcaaacaaatatggaatttgaagatggttcggaggtgaccattacggatattcgagccgttcaaagtcgcccccagattgacacacacggatttacatatgcttatcacgatagtagtctcactgaagaccagtttcttgataaggtaaatgttgagtcaatatatcttccagagtgtgaggcactgcttcggagctcattggatggggtcgatgagatccatttcttcaattggctggtattaagcatacaaaagtttctccttgtggatatctcattgttaacacatgcaggtacgagataccagttctgttctatcgggcaaggaggtagatttgaacaatcctttggccctggttggacctgcaagagtcgttcatattggtaaggagtgtgacactttggctggtctatgtagcttctttcaagctaactttctgaagatcaaacatccactagcgcagtagaaagggtctatctcgagctgccatcaaaggcagagaaacttctaaaaggaagacttcgtctgattaagttggttcttccttcttttacgtgagtcaatatggtcacaggacatatgttgatcataattctagcttatggcgccctgttaatggcccagtggagaatttcccactcgccatgtgtgacggtcgaacagtgtcacctactgcacgagtgcagtcagatcgaatcagacggaaatataccggaggcacaacttttgtgttacaagagtctgagcaaagatggtactacctcagtcatcagaaaaataatgaggttactatattcaagaactttgattcggattatgatatgacacaaggtaagcaattgcgcataaaaagactattataagcaactgacatttcataactagacgcccctcattcatccttcgtgccgctagttcatacccctgggattcggcctcgccgaagcatcgaggtcagagcgatggtgtttacatatgctccgaattagttatgagatatatggcagcctcaaccatccgcagtttggatgagatttaccatgcagacagacaagtttttattttctcaagtgtaggatcaggatatgtactgggctgaagggcaagaacaatatgggccatttcgatcacctaaggagcttttgtttgttttgttttgtttctaggcgttttctgttactataggcctatttagtccaatttttatcataagataagcttcctaaaatcatggtcattctcctaagaaacgtactatacttaggcgatactagggctagccagatctaatagaaaaatgatgatcatcggttgttgtttaatgtccatctctcgagatatgggcgtagcccgtatctctacggcctcctatgggatatggggacgtactaagctatggttttatgtacaataatgagcgcccataggaaggaactccttctagtgtatgatctggcgtacggccaattggctgcccgtccttctgatgattatcggtggttgtctcgggcctcttttaacctgagtacaacctaaaattgcccccaaggcagtgggaaggacaggtgcagtgacatatatatatatccagtgtctttggtacttgttggaatggcagtgttgacaggtgagaagctaatagcagttactgtaataggcaatactccagacattggatagttgggatacgaggtgatggacaccacgggtttgacacaatgagtcttactaagctgtaaattgatacagctcggaacaatcccaggattgcccaacaaaatatagtcatttggcaatgccaagacatgttcgggcttggcaaactgttttctgccaagacctgtttatgtacataaaatagcctaaaaggggaatttctacattacttttgcataatcatgccttcaatttcaaaacgaccatggacatctctagcattggcgtctagactttctgacaaagcacagatacacatcttttatttggcgagatcgttggatctgaggcaaagagacagaattgcaaagaacgttgtacacaggttgcgaaatcccatgagttctttcttcccattgtaaagtgcttctatgtacattgtctaatatatatccccactcttggtatgggctttttacatctgtcctgctggttcccatcttgtgataagctacagatatctggcttgggacaggaaatgtatttacaacatggtccccgtccgatgaatattgtatcaaatgctgtggtgagtcaattgccaatcgcacttagtccagccaagaaaagagcacgtcgtaaaatgctttggggtcttggaggaagggtgcatgacctagaccggggaacatatggagcgtgcagttagggatcatggctgcggcagcagggccaagtacatcataatgtcccagcttcgcagcgacggcagggggtgaccatgctttaccaagtgccgaaacgtcactggcgcccaccaagaggtaggtacgcgtctgcaggagaggcagctggtagatgatcggctggctgagtaaagcgtcggtgacgagggccatcacgtacgaatagtcggagccatagtcgccggcgtagatatcggctagcatgttgacccaggcatcatattcaggcttccagggggcattggggaagtagttggcctgctcataggccttgagagtggtaaagttcgacacaataccgctcttgtacgacgcgtcaattgataggtagggcacacccttggctacccaatcctccaagcccagtggattgacgaggaaaagctgttggatgctggccgggtacatgaggccgtagcgggcggcaatcatgccacccatcgaatggccgattacggtgacttgatcgatgcctagcgcagtgagaagactgtggatattcaaagcctgctgttgcacgttgtaagaatagccttgaggcttgctcgatttgcaaaagccgatatcgtcgggaaggatcactcggtagccggcggctgacaggtgacgcgctgtgtcggaccatgtgacgccgcagaagttgccgccatgcagcaagacggctgtcttctgagtcttgttttgtttccttgccgggatgtccatgaacgccatcgtgaggttctggcgctgattggagaagttgaacagcttcaccggccaagggtaggggtaactggatccgtataagtcggctggcacatggccatcgtagatggtgccaatagggtcggggtcggactgtgcgcagacgacagtcgtacacgacagaattgccgagaaggcactgaagatggggaatatcttcatgatgtggttgcttgaaaaaggacgaagttcgaagagcacggctccctgtcaatcgtataagaggaaaatagacttattctttcacctcctgatgcgatatataccagcttgagaattattttgatgtgaaatgaaggcggatcccagtgtagctagcaccagagctaggggcaccgcgatgctacctatatgtagttagtgatctaggggctgatcacagcctttcctgtttcgcttctcagccggataggggcttctcaaatgcaatttcattagtaccaacttggtgtttttaatcaactgaaatttcactagcacgtacttggtgtagttaggtactgttgaggaggggcccggggtgcctgggtggggcgctgtgctgagtaatggccacctccagccctggagggatttcgatttctgtcttcccttaagcattcaacacgcagattcttcttgatttcgttcaaatgagttacttttagtatttcccatcatataaatgtacatctacttggttgtcgtcaatcgaccatccaatcctgggcaaattggcccccaaaatttctcaaactagcgccgttaacgccatgcagcgtgaaattaatcacgtatacatctttgcgacccccgcctagcgctccattttttcttctacaagggtctcggatgaaacgggtcaatgccccgatcaggccgcgcgatgtaacctgatcccaaagaatcgaaaacttccgcgaataggacccttgtcactctgctgcataacacgctaacacgctatcccgccggtaacgcggtaatgtacttatgtcggggtgcaaaaaaaaaaaaagatgtaggctgaaggcgacatcactactgatacggccttgaattactacatatgtatcgaccgtcgcctcaatcgcttttgcaagaccatactacccacccccaggcgacctctagcaatttgctatgtccaaaaataccccaggaccaagcagggcgttggagatccaagtgccatgtatcgtgttcctcgtgaccacgccggctttcgtggctatacgactgtggtcccgagtcaagtctaagtcggggctcggctgggacgactgtactattttggcgtcttgcgtgagtttttaattcaagagattgagcttccacatgcagatttaacgctcctatcaacagatctttgcgattatcgtcatggcttttatgctggcgtcctgtgcctatggctttggccaacacatcgcgaatctcacaacaccgcataagctaatgactctgaaggtacattgggaatccttctcactgcagttttctcgttctatattgtggctgaggatcgctgacttcagtcctgccagctcttcttcgttagtcaagctttctacaagctcaccatgaatatgacgaagatgtccatcctgatgctatatctacgcatttttatccagcgttggttccggatcacctgtcatgtgctcttggctatcatcacctcctatatggtggccaccttcttcgcctccgtatttcaatgcacgccagtggcccgggcctggaacaagactatcccaggatcatgcatcaacataaccactaactggtatgccaacgccggcttctcaatcgctaccgatatcatcatattgactctaccgatgtacccgctctacacatcgaaaatccggttgaagcggaaaatcgccttgatgggagtgtttgccctcggcaccttgtgagtttcaaataccgcagtgcaggcgttatctccagactgacccggagttttcaagtgtcgcgattacaagcattctccgaatgcagacgcaggacttctcgtccaccagtcctgacattacctgtaagtgtcctcatagtcaccccgaactgctcttactcaagcacttacgagatctacagacgacatagcctcctcggtatggacgataaccgaagaaaatgtggcgattacctgtgcctgcctgccaatgatgtggatgccacttgctaggctctttccctcggttttttccatagatcatggggccgacagccatggaagctcggctgccaagaactcggaacctaacaccacttcgcgtccccgaagcaactggacccagcttcatgcgtaccctgataccaagggcatcagtatggaccaaaccagcgattccccaaaccgctcatcggaagatagcgcgggcgagggcggcgaatcccaggatcaaatcgaaaacggcatcacgaaggtcacggaatactatgtttcttattctaatgcgaaatcgcttcgaggaaaatatatctctaggcccgaataggtcgaataacttgtggggtcctaggcacacgatgactgagatgtgttctgaattatcgctaaatccgtgcaatgaataaatgaaaagtataattaataaccttatcaacaaacagtcaattgttgtagtttgatcgtctctttgctttccttagaaggctattacaacatagtctctagattttgtagtagaagcttagtgaacttcagaagttcaactacaatgtacctaggtaatgagagagttatgccccgggtggcatacttgacgcccgtacagggacactgagattcccacggttgtcctcaacaagacaatatgggctttccgctaccgacggagttgacatgcaccattttggagtacatttctcacgacgacccccatttagctaaatatgcaacaattagtcgcgactggccggcgatcgtcgagagcagaacattctcatacctcaatatcgagacctccgagcagttagcggaattcaatgagctatcatggggtcaaagagggagctatgttcgaactctccatttgattgttcaactagagtcttactatgatgatgatggcgacgcgtgtttgcgctacgaaaatgaaggggagatgcaacgaaacaacaagctttttgacacatcgactcagtcatttttcattactctggccaaatggccaaaagaaggcgccggctttagtctttcgattgaggcccagtcccccgatgatattctagatcaaacgcccgaggacaagaggtaccgttttggtgatttccgggatcagagattcgaaagatcataccttcaattcaattcggagatcgttgctatcaaatggccggccatccctacagatatctcccttgtaatcataggcgggcatgatagaaggcaaattgaaccagcttcttgttcttttgtcgtgtcgaagttacctcgactataccgcctgaaacctaatttgaatgatcattatagataggacctggaactgagaaaacgctgtagaaacggtatactatatgacaatgcccggtaggatataatataataattggaaatctagatttcgcggattctattctactatggtatgccagtatacggcagctctgccttaacttctggtttagggcccctttcaattaagactctttcccaccggatttaacggtaaaaggaaagccagatatactaagcttgcgattgcgggagttctcgcaataattgaaagtaatgagcgtgacctaatttgtgcttggaaaaaaattcttctagcctatagataaatagaatcacaatctctagcttcccttttggccctatcttaccgatctatcggtgggatacgaaccggtgactccaagtggaaactggatattcgcagaggaaggagcttaagaatccgaatataaggatgattatcacttgagtgacccaggctccgataatgagaaggatgagaccgatgtaaattggacagccccggaggaccgcaatagcagaatatttcggtgtaagtacattcacgagacgttcgatgtgtattatctctcagctgccaatgccgctctttgtatacccaagatgaataatatggttttggaagtgacgaacgcctggaatatacacaagttcgtgtacactgtgaggaatggggtagcgaatgcgacctggttccatccctctgcttctacgagtgtatacaggccaagcgatagagtcttacaagtctggaagcaggttgcttccgcgcgtactagaggttttcttgaagttgaaattagccacatcagggggaagtttcattcaattctgcaaagcgtttacacggacgtcactttaggaacaaagtgggatcacgctgcaattgacaaccgacaaagagttcagctgtagtttacgaccgaaaagtaataggagcgaatggggtggtcggcgagtctgattgagcgggataccaaaactcatttcgtacttttgaatcattcaagggatcaggaaaaagctagaatacacgtagcttcagcaagagagatttaaaacaaacatgagcggcaacagttgtaggcatctctctcaatgttttaccggacttcgattctcaacggtgaagggaggattgtaaggaaagggagagattataaagcagtcactatgtgaatgaaaggggtagggatgtaccagagaggatatcaagggtccagaatcatcatcatagatgaaggggactggaaatggggacaaatttaaaatatttcacgggaaagacccacggaaaatagtactcagatcaaggtcgccatgattgcatttggatacaaacatgcatggctacaacgtattgacttttaaggacctcttctccaacctcgtgccactggctcaaggattgatgaaaagaaaatattccacgaatggaggtgccaaaggatacgcctgtcaatgacacgagtgccattgaacaaactgttccgccgcgctgtgcaatgcagggaccagcctgtggtgaaccgtcttgttgatcacagtcacccaaacaaggtaagtatgaagaagaaagaagaaagagaggaagaggcgggggggaggcatccttatataccttttccctggggcggtggcagattcatacagggcggtggattcatacatggcggtggcagggggcctaatcataagtaagacggcgctaaaccctgaaggcaaaactaatcagaacaggcagttcatctgcgggttacaaaataaatatacgaaaaaaagcaaggtaagaccatgaacagacatcttctccaagcgcccggacaagccgaacagttgatgaagaggattcgcgtcaatcgggggtagtgtaagcccgatgacactgtgcaacgaggcatgcgcaagcacagaggccaagtcgcgaggtccaaacattagaataatcatgatgttctgcaatgcagaactttcagcgattaaactgaaaagaacagatactacacttgatctaagccagaggcaaagagagctgaagaagaaagaagagaagacgaagttctgggggcagggccactttcttatagttatcctaagggcggtcggcttctgccactattcacaaatgagacaaacaacgaataggcccgcttaactatatatgtaaatggtaacgtgatgataaggaacggcgtctcttatttccggctgacttgtttggaactgtcattcattttttggagggagaccataatgtttgtttgtttctacaacatgggacctcgatcgtattttggacattacagacaccgccttattaatttagtaccgcttttgccaccgctttagtttcaaactccggtgaaccattaacaaacttaagtcactttgccatatcaaatgcttcattgtctacttcattataaaggggttgagctttataggaatcaggtggaatataccttcttttgatcgaaatgtaagttcttatactatgcaaagtagaagtgggcagaatatatgggagaaaaaataaagagtggcagaaatgtggcataattttaagtggcaccagatcaggaaggcggtacttagccttcaggcaggggccgtatcagttcctcgctcccttgcttcaactttaccagcttcagcaatgcagctgtatcttattcgccatgcggaaacagtacataatgttgcaaaagtcctgtaggaattgatatttctcaattggcattcccagttgacttgcactgacttcttgtgatagggcgggcaccactgattcggcactgaccaaccatggagtggctcagatcaattgccttgctcagcatttcgtctccaattcaactaaattcacgacggtgttctcttctgatttgagccgagcacgaatcacagccgagggggtctgtcatgcacaggttccatcctccggtgaaacacctttgcaaccgatagttactcaaaatttaagagagaaagattacagatcgatggaaggccgcttctggaacacttctcctccatcgccaaggcctcgagactgggctatccctgagtcaaaagagtcgatgagaaagagggctgaaagctttttcaacgaacacctgctcccactactgatgcgtgatccaaacggccgacagaacatcgcagtggttgcccatggcattatcctccaagagctatgggcatattgtattgagatcttcaatccaacagatacacagattgctcctcgaattcatgacaccaacatgactacgcctcatcggaaacctacctggtcaaacaccggctacatgactgtactgattaccccagacgcgacacaaaagactatactgcatactttcatgccgggcttcgcatttgttgttctgagtattgacgagaagaaacatctttccaatctccgtcgcactaggggtggcgttggaaccgccgcgcatgacgtgaaacaaaggaagattgaccaattttttcgataatcgactttcaacagagaaactgtggcgatgtacaagttctaccatcttcacaatgacccaaatatttagtccgtgtgaaacacctcatccaagggcttccaccaccctggaccctccgcactactcacggctccgggaatgggactctcctaatcgtgggttattagcttctgcatctctccatttgtattgaatcctcaatatacctgcatcccatcggtcatagcccaccactctctcatcttcggcaatgaccgcatgttctccatatcagcttcgatatctgttccgacgtacttgaaagtcgcaaatagagtccgatcgttgtcgaagtagattgagtctgtagaaaatataccatgttagccagtttgaacatccaatatgatcgtacatatttttggcattgaacctacagtctacaatgttgcattccttgatcttttgaaggatctcaggccaaacattggcatggcactccttgtatgctgcaacagctaggggcttgaggtggacgatttgggcgaagcgacggggttgaggttgaggcatgattgttcgatatagattaaatatttgaaattaaggcgaattgcaagagacgaccaactgccttttatgccccgctctagcttcaacccgcactcggagtgcgttaacccgagagcttggcatatatccacatgcatggaggcggcttgaattaatatggtcacgagacatcattagaatgtagatatatggatactactccgtactagtgatagcccatctacatggatgtacttgtaatactagtggtaggttgtactttccccttgtatctaaccccccctggacaccccccccnnnnnnnnnnnnnnnnnnnnnnnnnnnnnnnnnnnnnnnnnnnnnnnnnnnnnnnnnnnnnnnnnnnnnnnnnnnnnnnnnnnnnnnnnnnnnnnnnnnnnnnnnnnnnnnnnnnnnnnnnnnnnnnnnnnnnnnnnnnnnnnnnnnnnnnnnnnnnnnnnnnnnnnnnnnnnnnnnnnnnnnnnnnnnnnnnnnnnnnnnnnnnnnnnnnnnnnnnnnnnnnnnnnnnnnnnnnnnnnnnnnnnnnnnnnnnnnnnnnnnnnnnnnnnnnnnnnnnnnnnnnnnnnnnnnnnnnncccccacctccctaatctgatcactgtgtcctattcaaactgatctcgctggtctcttttctgactctttctaatttcctgattaccttggtctcagcctgcgacttaccacgatctatccgaagaaaacactgaaacaatgacatcaacaattcccgaacttcctattttcaatctcggcccgtccacactactggatattgcaacggacttggtcaaccgggttcaacaagctgcgaatgacctggtcaaccatgttttgccgcaaaacgtgacatttgagaatactcttcacccactgacaaatattgacaacgagatcaaagggaaagctcaatacctcgcccttttccaggcagtttccccttcgtcagaaatgcggacgacatcctcaacagctgtgaatatggtggataaagcatattggggtgtcttccagataccgtctctttttgctttggtcaacgttgtttataagcacgaggaggatagccacgccgaggaaaatgcaaagagtgaatatcgaaaacttcaatgagcagtgatgccggcctccaataccgaaaaatgatactggcacctggtggaagtcaaaatgagatgatggcactcaaggcattcttggggaggtcgcccacgcttgacgcatatcttcgagatcttggtgctcgttgatagagcaagccgtgtgattatgagtgaatagaacaagtctcactgactctaccaaagcctcaaataatactgattgggcacacgtcgtactctgcttcggtctggttgtcggtgtggctcttcggcaaggcaggattgaggcaccaacggccataactggccagccaaggagtgtaccttgtatacataggattctggacaagacatattgtagtaagccccatgcgcaggtgcctgaatcagtagacgaagtgcattattgattattgatgtaatcaggctttgactgtcttcgtgcagattgacaggcatcccctttgtggctttcaggtctttgtcgctgtgtttccatgaagctatatagaaaaaatctcggaccggctcgcttccgccaaatacagtttagccagtatccacattgggaatgcggaaggcagatcagtctccactctgtgtctcttggcgttatcagcatctcaccaattgttcgcgggtcggatatttgggtcgtctgcatttttatacttccccatttgccacactacgacccatggccgacaagacaaatcccaaggggacagccccttcgagcgaccctcctcccggccacgagaacacctccactaagtctcaaccaggctcagtgccccctgtgattaggcaccagccagggcgctaggcgggcatgactcaatttacctctccagcaaggccaacgcctagccaaactgccagtccaacttctagtagagctactagagcttcgccccttacaactgaagatgatctcaacctactatgcattgccgttgactataaagatcggtttactaccatgaagggtaatgccgttctttatgaggcgaatgcagaagtatggagagcccatgccgggcagaatatcagtcaccaaacggttcataagcacatcactgacaggctaaaagagcattccgccatacttgctataccggaacctgaccgcgctaaactgaacgctaccgaagctgctatgtttgactacggcaatgagatttacgaaatgctacaagagaatgcagtggcagagcagcgacgaagagatcgcagggctcgtgcggatactaaggctcaggcaagtaccgactctgtgcgggatgacacagccgatgaattagtgcaaccagcaagggaaaaaaggcccagaaatccggtggactctgagaggaagaaatgcagcaattaacctgtctacgtatagcataccttactaattataatatagaaagtgagcggccaacagcccggccacgaaccctacctccctcgccattgccttcctcgccaccactgcaaacagaaatcgctctatttcttagtatgatgaacagtcgagcagccctagaagcttcaaccggggctaaaaaggaagatatcactcggctagaaactcgaatggatagcatggctgttactatggagggatgatgagtttgcttagaaccattacgcacaggctgccaaagtaattaaacttcattttcatacaaattaatttacagaacgaatctcaactgtacatacacttaaagtatcgaaagtattagtatattgtctctttcatgatagggtctgactcttaggaataggacgaatccaagaaacggccaaattggttgccagagatatcacaccgatgatccatagggatcgcccgtagtttgacccattgtatctgaagataatagcaaagatgatacccccaagattaccgagaccaccaacaattccagaaacaatacctagtgacaagatgttagctcgatatttaagaagtaataacggaatcacgtaccattagcaaaaggatacacatgagggacaagagcaaagttagccccattagatgcctcaatgaagaaagccaggccggcgacaagaccgaacatggtcgcttccgtggacgggttcgacaacccgatcgcaagctggaaagctcccatgccgatccccaaaaaggcgatcaaaatctttttagaccaggccgtgcctgtatataggtaaaccaagtctccaaatagaccacccgcaggccgacagacgacgttgagcaggccgaacatggcagcccactgtcccgatttcgtttggctcatgtgtgggaattgttctgtgtagtaagatcccaccatcgagttgattgctagctctgagccgaacgagcaggcatagggaattgccagggccatagtggatagactcatggctacgttcagggcttctcgccgagtcggggagacgactgtctcttgtcggaagatgtcgatctggcccgttgctggtgtatcgtctatgacatgtggtgattgggtacctttcttttcgatgtcgattgtggcggcattgtggggtgtcatcgttccgctcgaagaagtgcaggagttgatgtcgacgatgttggcgttgggggccgaggtagtgccatttgaatctttcgcccagaggtttctctcagaccactttcctgtcggtgtatcttcgcagaggactaacatgcatagggcgacagcggtgatgatgatgaatggaatgacgtaggcgatacgccatgctttgtgagaagggatgccgcgggattggacgagggagtcgtaaatggcgggcattacaaagcttcattgctttcgttagtggattaataggagaaggggaaaaggtagacacctactatgtgattcctccgcctgcattgccccagcctccagagagagaattggcagcaccaacaatgcttttgtcgaagaaaccagtgcaccagacctggcatgggacgaaagtgcctcccagaattccaatgaaaaatcgtagcgctattaggcccttggggccagtgacgagaccggccatagcagtagggatggctccgcatagaagtagtcctacgaagaccaatcgtgggccataacgatcacaaagtggccctgcaacaaatcggacgagtagactgtagcggtcagagaggtgttttcgattgattccatattgtggtacctacgttgccaggagtgccacaatatttgagttggcaacatcttcttgtgtcattttcaaatcctttttgatagtcacattcaactgggaagccggagattagagactgcgttcttttggtatataaaacctgatgggactttttatcgtgaactcaccagtggtggaaaggcataccatgataggaatgccaccatgaagccaagccatgagaagaagaacacccgtccatatttatcgaaaggattcaatactggaatagatttcgctttgtgggtacttgggttgatttccggtgatacatagaggcgtttaaaaaaccctggtgccattttggttggctctttgtgtagtcgagcgatgagatgaaagtaggctcggattacttgatataaccttgtggattaaatggaagtaagagctctttcggagatttaggagaaaattcaagaatagatagaccttcgtatctatatagacgtttagtgtgctttgctagctgaagtatatatcgcaactgcatcttgccatgacacatgcaagcacaatcagtctgatattctgcctgtcaggttgtccaatcaccgcaaatagccacgtgctgtcaatcaaaaagagttagtcaaggcaccgagtactccgtatatctcaggtcgctgatttgatacagcgtaaggacaaggttgcagcaagatcatcagaccctggaatcaatgcggaacttaatttttgccccagacttcatccctgaaacttccgcagtatcctgccatgatatgctggtagagataaggtacgaagtagaatgacctatagcagtgtaggatgtatactgtaccagattccatgattggagggaaagcctgatagtgtgattcagtccagttcatataactccgcggaccttcaattgacttaaagcttacatcataacgttctaccgaacctaggaacgggtcttttgctccacgttgcccagaaatccatatcgttgataaacgcgggcctcctcattggatgccaagccaaccgcgataggaactgaagagttcagcccgggtctttgtattggacgaccttggcgatttgagctccgcggaaatacttaattctgactgtgactccagttaatggattcagggttctgggttctggggtgaaccctaccgaagatctggtacaatccaccggtctaaaattagggcttcttttagcaaacgctttctaacaatcggcctgagtatctcttttccctgtaacttttactatgagcaaaattcaatatctcctatttacttgatacaccgagataagaggatttagcgttgactgtagaaataataggccgtggcagtttgtacattcgctagataattagtcaatagtactcagtataccagatataggagatcttcatgtgttgtcaaaagtcatccagcctcatcactgggtaactcttcataggtggtgtataaatacctgtaaccactgttggttgatcagagccaggctttaaaccatctgatgaagagttaaaggaattaataagaacctggagatgagagtcgtctaatcaattccatgtctcagatatgtatcgaggtcaccgtctttatatattggaatgacctagcatctgaagatgcctcttatgtggtctaaggcggcgatatatactggcttctttggcaatatttacgtagcatgtgatcttccatcggtccaggaaaagaagtagtgaaaacaatttatgctaagcgcatacattctcaagtgtactcataaggccatttttcatctcgatgttcccatatgcaacatattccatcgcataatctgcaactaccaatcaatggacttggctggttgcaccgctgatacaccagtcaaaaagccatcggtgaccttcttccccttcatacccttgaacttcttatcaaccttgtggaaaggatcctccgtctcactcttacgcactttccacttctccgtgcccaaaatcgaatccaactcctcaatcggcggaagtttgacatatacccagccatcgtccctctcctcaacagggaacgtagcaatattcatactctcatcatttgagcaacgacccgcctgttcaccgttgagctcgaagttgcgcttgtgatacggacacgacacccaatatttcccagcatcatcatcgccaacgaggccatcagaaagaacaaaagctcgtttgtgcgggcacatctgctgcgtcgcatagaacttgcccttgatcttgaagatagcaagctgcgtgtcaccgcgcttgacattcgccgatgacacctgaggtggctcgtcggagaaatgatctgctcggacaactggctgccaggagacacttgaccacttgtggcctttgaaatcctctcgctcggcagagtccttgggccagtatgtgggtcgctgctgggatcgttcttggataacttctaccgtctcgaccgtttcgtctgtgtttgcaaattgttggaagacttttcggcgcttggggtctttgacggtctcggtccactcgcagaagtaagtatcgactagttcgcgcatttgcttttccatgtcggcgcagatcccaagtttatcatccacgatcacttctttgaggtagtggattccgcccggaagattttcgatccatcgtgctgttcgctggagcttgtcggcggtgcggatatagaagatcaggtagcggtcgattatgggcatcaccatctccgctggcacatctgtaacaaggagttcggcgtgtctaggttttgcacctccgttgcctccaacaaatatgttgaacccattttcggtggcgatgagcccgaagctggcaactattagtcctgagtgttttcaccagcgtaggatttgcactcactctttgttttgggcctcggcacactctcgtacgcagccagatacagctcccttgaatttatgaggcgcacgaatgctcttgtatcgctcttccagtcgaattgccatgccgacactgtcgccaacaccgaagcgacaccatgtggttccaacgcaactctgaacgttcactgtcagttggtactctcttgaagataattgctccacgtactttgattgctcgaagagcctttgcatatgcgtgtccgctctccatacccgcatccacaagttccgtccagatatttagaagatcctgcttcttcgcaccgaacatgtcgatgcgctgggcaccggtgattttgcaatacagaccgtatttcttggctacagatccgatagcaatgagtttatcggccgtgatttcaccacctggaattcggggcaccacagagaatgtgccgtttctttggatgttggccagaaacttgtcgtttgtatcttgcaagtcattgatacccttgtccatgacgtgcggattgaacaaactagacagaatggaaccaattgcgggcttgcaaagttcgcaaccaagagattctgggttctttccgacggctttcatgatatcgacaaaggttttcagttgcttgatggccacgatgttgtatagatcggctcgggagtagggaatatgtgaacacactgaaaatgttaatgatgacaggagctagcactggagaaagttgatattacttacggtggtttgatacctcttgtcccatttcaagcattgtcttgttgaagattgactgaacaagaggcatgcaacctccacagcctgttcctgctttcgtgcatgacttgacttgtgcaatggttgtgcatgtgccattcttcacattatcggccacatctcccttggtgacattgtggcatgaacagatctgagtgctgtcatcactgcagagatgagttagaatttctccccaatagcagaactaacgatactcacaggtcatctgcattttcctccccgccattttgggcaccaaggatgaattgacttggaggaacctcgagttctttctgaagcttaaccatctgattcaacttcagatagtctttggtatctccaatcatcatgccaccaagcaagaatttgccgtccatagtaaacaagtacttcttgtacactccactaaaggggtccttatatgtcaaagccttcacaggaggctcctctagtgaagtatcccctcccagaccagggccagtggaaggtcgacgaccgggaagaaatttcggcccatctctgtcagcaaagaagtcaccgaaactagcgacatcaactccgagaagcttcaactttgtgctgaggtccggccgcgtgaaacccctaggctgtttatctgggttggtcagattgaaggcgagcacatcggccatctcaatgccgggagcaatgattccgaatgtctggttctcccagcttgcgcattctccgacagcgtagatatctgggattgaagtttgcagactatgcaagttagttggagactgaccaaaagactgttaatggacgaaccattcatcgatcacaaatcctccacgctcaccacactggatcccaatgttacgacccagctcatctcgaggttgaactccaatctaagtctgaatcagcacatccatcatcagacgaaagcaaacaaggacacataccgcaaagcaaatacagcaacaatcaatgctctcaccatcctcgaaagtaatccctgtcacattatttccctcgtcggtatgaacaatcttgacccgtttctgatggagaacatcaagtcccaactcctggatcttgcgagtgaccaaggaccctgcatctccgtctagctgtcgcgccaggacccatttattccgatcaatcaatttgacatttccgaaatcctccaggtctgtcatcgccttcgcagcttccaggcctagtagtccgcccccgactgtaacagccgtttggcctttatgctgagcagcaaagtcgatgaggcgttccaagtctgagatagttcgatatacgaagacgcctttggcatcgtaaccaggtgtgtgtgttggaagagttgcatcggagcctgttgcgaggacgaggatgtcataggctatagtgtcaccggtggaggtttggacagttttctccttgggattgattgctgttactcgtgtgttgatgtggtgatcgaaggatcgttctttgaacgagtcatactaataaggtgtttttttattaggtcttatgttcttcgctctcgaataggtgaaggcttacccattccgttggattgaggtataagtcctcaatcttgcgatgctcgaaaaacgacgagagtccgacgcggttgtatgctacatgggactcttcgccgatgacaacgatgtcgtattttcgctccgtatcctgtttaataatcttctcgctagtttttgttagaaaatttctcatgtccgtcgttgaattttccttacatgagtgagatagccaccattcccagcccaactactacgattttctggcgctggacatgagttgcaggactagggctgccatcgactggctccccatatcgtagtccatccagcacaggcatggttgagactggacaaggtgagatgagtacggtacaagcactgacgactacggaacacggcaatcattctaattttaagaaaagtaaattgtcccactgggtgtgtcactacaatgagattcgtacgaatgaacaaatcaaggctaatctggtcatggaatcggaagaatcaggaaagttctctcaggagattagttggttcgatctccgcggagatgatgtttttatgttggctgtgattggctgttagggtttcgggtttatctgaacgtctaaagataagaatgaacaataagatacatacttgactagacttgacgaaactctgatctcacggcatgtggagggctgtggatcagaagggggttcagggtccgcggagatctgaaaagtgctatactggcgatgatattggggcggagccgaggatcttaggcctagatgctgctattccacagcaaaatgtgaatatttggacgtttaggactatttggattcattctactcggtttttacaatatttttgatcttattttagagcaatttcgagggtctcttataccaacaatttgataacagcctcgcgccagcaccatcatggccagcataaccacacagacgataacagagtcccaaacgatctctcaaataacaatcgagaacatcataccaagtccaggggagctagacatcccacttccaccaccgtcgaagaaccttgtcgacatcttggatgtggataaaggcacaccggatagccatgtacctcgcgatccacgattgattcggttaacgggagttcatccattcaatgtggagccaccattgacggctttatacaaagaaggtatctattcccatatgtcatagcgaagctcacaagctaagcggataccgaaggctttctcacacccccggaactgttctatgttcggaaccacgggccagtgccccaggtccgcgatgaggatatcccagattgggagattagtatagaagggtgagtgcgatcgaaattatgctcgcaggcttcgaacgggaactgattgatgagctaggttggttgagaagccattagtcctgagcttctgcgaagtgcttcagaagtacgaccagattaccgccccgatcacactcgtatgtgcaggcaacagacgcaaagaacagaacacagtccggaagtcgaagggcttctcatggggtgcggctggtttatcgacagcgctattcacagggcctatgatggcggatattctacgcagtgcgaagccacttcgaggagcgaagtatgtctgtatggagggcgctgataagctggtgagacttcctatatcaagatttgagggtttcaggaaccatcctcgagttaagactgacacattccatagccgaatggattttacggaacttcggtcaaattgaactgggccatggacccaaaccgaggaattatgctggctcataaaatgaatggcgaagaccttcggccggatcatggccgccccttgagggcagtggtgcctggccaaatcggaggtcggagcgtgaaatggctgaagaagttgattctgactgataccccaagcgataactggtatcatatcaatgataaccgagtactcccgtaagtcttacgctaaacgatcgcgcagtgagtcatgctaacagttgtcaggacaatggtgacgccggaaatgtcctcccaggatcgcaagtggtggaccgatgagcgatatgctatttatgaactcaacgtcaattcggtggctgtgtatccacaacacgaggaagaaatcgatatatccacagctgggcccacgtatacagtcaaaggatatgcatacgccgggggtggccggaggataataaaagtggagatttctctagacaggggcaaatgtaattgcaccccggaccaaaggatggaacgtggctaacatctctggtcctttagcatggcgcctcaccgagatcgagtatgcagaagacaaataccgtgattttgacggcgacctgttcggtggcaaggtagacatgtggtggagggaagcatctttctgctggtctttctggtcgttggaagtcccagtggcagacctagagactagcgatgcaatcctagtccgtgcagtggatgaggcattaagcgctatgccgcgtgacatgtactggtctgtcttgggcatgatgaataacccctggttcagagtggcaatcacgaaacaaggaagtacgctgaaatttgaacatcccacacatccagccaaagctggcggatggatggaaagagtcaagaagactggtggtgacctgcttaatggtaactggggcgaaagggttgaaggcgaggagctcgtcgaaccggagcctatgcaagaaataaatatgaagaaagacggcgtgaacagacaaatcgacctgcaagagttgaaagctaatagcagcagcgaaaagccatggtttgttgtaaatggcgaagtgtatgatggcacaggcttcctcgaaggccaccccggaggagcgatcagtattacatcttctgctggtttggatgtatcagaagacttccttgcaatccgtgagtcgagattaaaataccttcagactattgcaccgctaatttgctcttagacagtgaaactgctaaggcaatgatgccggattaccatattggcacattagacaaagcatctcttgaagcgatgaagagcgattcggctgcggattccgatgagccacgcgcagtgttccttcagtctcgagcatggacaaaagccactctcacagagaagagagatgtatcctgggatacacgggtattcgtgttcgacctggaacatgagaagcagacgctcggcctaccaatcggccagcatctgatgattaaagtccaggatccatccaataacgaagcagtcataagatcctatacgccaatgtcagacacaaacctgataggcaagatggagttacttgtgaaggtctacttcccaacggaaagcattccaggaggaaaaatgaccatggctctcgacaagcttcccctgagctctgagatcgagtgcaagggtccaacgggccggtttgaatacctcggcaacggccgggtttcgatcagtggtaaagaacgccagctccgctcgtttaagatgatctgtggaggaacgggaatcacaccagtctttcaggttctgcgggctgttatgcaagacacgcaagatcccacgacatgtgttgtgctagacggcaacaggcaggaagaagatatattgtgtcgttcggaccttgatgcttacgtggagactgactgtcggaaatgcactgtcgtgcatacattgactcaagggtcggataggtggactggtcgtcggggccgtatttctgaggaactgctcgcagagtatgcggctccagaagagcagagtatggttctggtctgtgggccagggcctatggagaagtctgctcgcggaattcttcttgcccaaggttgggccgagtcggatcttcacttcttctaggtttgatgtgtctattttgcatatcagggcatgtaacattggttgtgtttgagttgtacaataaaaatggatatgaggcaacaacggaagccggaagggtatagagacactgggctttcatttgcatagacacgaaatgaattttgaaggaaagtcgtcaatcatgagttgtaacatgtccaagcagtacagataaatcgggtgataaaagtaccaactaagctccagtaggttgctctttacacattccgaatgtggacgaattgcttccttcaatcaataatagttcttgacgtctaatctcactcgtagatgctcaaaaacgctggttgggtctgtccgcgaagagaagaattcccctgatttagccattgatttcgaagtggcttttccggactccatgctgcgaaggtaattgacaaaggcggaggtctgttttctgaaagactgatacaggtggagaacagccccttcgctttcgttgcgcatcccaattccatctgcccttgagagaaggccgaaactgagaatagtgccgaaaattgactcgagcagtttggcagcctgcgcatggcgcttactgaggaataatgcgaacaacatctggtcaaggatatcttcgtgatagtcgcgaagtcgtggtaccgagtgagccgcttcaatcgtaccgtcgatgtcaccgcggttgaggcagtgctcgattttggtaagtgtgtcttgaaagcgctgccagatggacccaattccaatatggaagcagtaatcacttaccgctagcacaaagtgctgggcatccattctgaacttctggtacacattgtgtgtgtctcctgatagagatcctcgggcagtagaatcccggataagtcgtttaacggcagaagccatgcggattaaccggagcaaatgcttgaacagacaatcatacttattcaaagagcgagcagtaatgagagattcaagaacttctggtggtgtgtactgcagacgaaggaagtccaaagcctctattgcattcggatttttacatccttcaatttcttcgtctgtcaattctcgaattccgaagctcaggccaccaggcaattccttgtccttctgggcgtgcgttttttcgtcatcttctgtatttgtgccaccaaagtaacaatctccgagcagaccaattaagacgagtcgcaactctgaactagctggcggccatgtgtcacgactgccgaggcgtagaccggtgtcgacaccactgcgcacttttccagcccttcgctctccactttccatttccgggtcgaacagtgaattagaaagacgagcgacaaacgagccctctcccagcaactggaaacgccattgcatgttcagatgatggcgaattcgatgctctttgaagagaaggtgcaggcaagagtagtcgatgagaagtgcctgtgacgaaagaatgggagcaagggataaatggaggccatatgtcaactcaggaccaagatagcttctttcattggtatcttcggcttcaaatccccgggctttatcgagcagtcgcttgaggccatctttcgaaagagccttgtaatccgtcactggtcctgaatcatttttttcatcgtcgatatcgaagagttgaaaggctgtcgttgtaacctctgtgttggcagtttgatcgacggtctgggtgaccacatttgatgatgaatcctgcaagcctgcatccccctgatgatatttcttgatctcagcgcggagtcttgactcgtattcctgggcttttgtttgaatttgctcaatgccagcccaggtggtcgcacaatgcagatggagaccaccgattcgtgagagaacatcgcgccgtgcgataggatgacgaggatgggatcgtttcaatagttgaagacttcgcccacactcaaagatagaacgggcttggtcggccgggatgaaagacggcatgtgctccgcttggtagatatagtcaattcgcgctggcccagtcttgaacttgccacggtcataagtttccagtcggacgaagcttttgtcgtttgtcatatattctttgagagctgcgtcttcggatctaagcccaatccaagtctcgatgaatccgaaccatggctgagtcactcgaatcacaatctcatgcacaaggttctcgatccagccaaacttctgggcaaaaaaagctgcacgttccacgacaattgatatgacttgtgcgtccgagacagccctttgtgcagcgccaacaatagctgccaggacgcctaccacgtccccgcagcggtgaaatagtgcctttatttgtagaagtgaagcaatattttttgaatgatcggagatctgttgttccaggttaaagattattatctcaaccgtgctagttaatgtgaaaaacgtagaaagttctctgtagttggctggcgggtcttgggcaaataaccgcaggcgctgcatgttggtaccgcattgtaccacattttcgatcacattttccaaggccatcaggctaataccagagactcggatattatccttcaaacatctttcaaattggttggttcgttgatcgtagcgaaagaatgcagagctccagccaagcccaagacgaagtagtgatcgaatgaacacatctgttcgaacaattcgagtaggcgcaccgtctttctttaccatgtttcgttgtaccaaggctgcatcgaagccctgtgctccagattcgctaaaataggctgacacaggctcttggaaagacttatgttgatacctctcccacgatttctgcgggggtatttgaccaggttcttcctgaagtaaatccaaagaccagatatcgttgttgtcgcctgatatgtctcttaaagaatcacatgttgtgtcagactcgctgtctatggagggattgatgctcgagtcggtaactgattctggtttctccaagccggttggaaagagatccagcttccatacagggtcgatcttgtcttcaggctgtgggtatatctcaaaacaagatgtagtatcacctataaataaatgagtgttattgaaggccctaaagtatctgcggttgagacttaccacttagagtagtgttccatggtaacgatcccaatggctgcagagcttctatgctgaatttggagagtctccagaggctttcactcgagaaaggatccagctcatgatcatagtccatagtgagaccatgctcagatgagcaagatgtttgacgcgtgaaagtcctaggtcccgcgacggagatggttatcgccgtgcacagaccgataacagaaagtgcctgctcgaagctcaataccacctatcccactacaattcagtcattcctacttcctgtgatcctcggatattgcatcgaagctacaatgcctccaaaaaagaagaccaagcgcgcgcactcgcctacaccgcaagaagataccgtggcggagtcaagcgcaaacaccccgtcaagcgacagcgccggcaagtcagacacggactacgacctcatcacagatccctggacagatgagcaagaaactgctctactcaaagcgatcataaaatggaagccagtcggtgagtttaattctcacctctgttgagtcgacagcgcagctaacggaccgggcccataggcatacacaagcattttcgcatgctcgcaatctcggattacttaaagagccaaggatacgcgccctctacggcggaacatatgcggattccagggatctggaagaagctaggctcattatacaatttggaagctcttgacgaacgggtaagcggcgaatgatggcttgttcgcgctggttcattttgctgattagagatatctttacaggaagattcggcgatcaccgatgtgaacgaagacgataaagggtcgagtgagatgtattgtgcatttgagctcccgtatgacgagtacggcgacatgatgtttgacaggcggcttgcgatggaagagtccctgtctcctgtcaccagtcgcgccagtcgtgcaggcggatcgcgacgaggaagcacagtcgcagatacagatggtaaggagtgacattatctacagcatgggctacaacccataaactgacttcttgcccggcacagaaccacgatcttctcctgtcccgtctcgaaaccgcaaaccacgtccctccacgcgtggaacgcgctcaactcggctgcaggtggaaataggcccagggagtcaaggcaaaatatcagatgaagggggtgattcggcagaagacactggtgcgaatgatgaggatgacgaggaaggcgaggatgggaatagcgaagaagatgagggtgagggcgaaaaaggtggttcacggagtacccgagcgcagacatctcgttccaaagccaaagataataggccttcgactggcactgcgacacgcaggactgcccgacggcgttaacatggccgagttttcgatgtgggttttgtcctttgataccaatggtgtttggatggcgttttcttttgctttatagatgtgtgtggccaagtaggcatcttgtaccctattgctatagtagcagaaccgatcaatctacgatatagatctaccaagatattatcaaaggaaattcgaggtttttcgggaatcaggcctccaggtaaaccaaaactcggtatatttcgatcgctataggtctaatgttgttcgaacggtacaaagggaatagatcagtgtgtcatagtacaaggagtgtccgcagcgcgtggtttacaggcgcttgatgatagccccagcatactcctgggtcttggccttacctccaaggtcaccggtgagggtctaaaggtcatggggtcagtaatgcgcggtatctgtaggaataaatgcaaaaactcaccttgccctcggcgagagtgtcgaagatagccttctggatgcggttagcgtggtcggagagacccatgtgctgcagcatcatgacactgctcagaagcatagcagtggggttggcgaggcccttgccggcaatatcgggggcggagccgtggacggcctcgaagatggagcactcgtcaccaatgttaccggagggggtgagaccgagaccaccgatcagaccggcgcacatgtcggacaaaatgtcaccgtacaggttgggcataacgaggaccttgtcgttgtagggggtagggtcagtgacgatacgcaggcatgtgttgtccagcagctcagcgtcgaactcgatgtcggggaattccttagcgatctcacgagcggtgttgaggaacagaccgtcggacatcttcatgatggtggccttgtggacaacgcggaccttcttcttgttgatggactgcgcgtactggaaggcaaaacggaggacacgctcggaagcctcgcgggtgatgagcttgatgctctgcacgacaccgtcgacgacaacgtgctcaataccggagtattcaccctcggtgttctcacggatgagaacggtgtcgacgttgtcgtatggggtcttgtagccagcaatggagcggcaaggacgcagattggcgaacaggttgaaagtacggcggagagtcaagttcagagagatgtgacccttgccaacgggggtctagaaaggcaaaggttagtatcataatccagatgcaagatatatatgggaaattggaagctagaacatacagcgagaggacccttgagggcgacgtagttacggcgcacactagcgacggcttcgtcgggaatggcggtcttgccatccttcaagatgggggtgacatcaacggattcccacttgatgggggcctgttattgacttagtatttcgatcacgttagagagttaacatgctcataccttggcagcctcgaagatgtccttaatggactgagagatctcaggaccaataccgtcaccctcaatcagagtaacaatgtatttgccctattagaaatagcagatcaattagcattgccgttgagaatatacgtggtgatgttctcgaattatggtcgctgtgcgctgcgcggctggcaccggcatagatggataaccgggctcggttggaaggaacatacatcaggacctttctgacccttaaacttggcaacagcctcctgtgcagggctggcgtagaaccgaatctattcaaaagctcgagagttagtcaattgagctctgaatagttagctactgagtgtcctgaggggttggtacctgcgcgataggagcagcaaatcggggtgtcacgcgggacgagcgcatgcactggcgagcgacagagaagtttctggtggcaatcatcttgatatattccctttagtttcttgggtagaagttaaagaggtggtgagaaagaatgaaggaaggagaagttgggaaggaatgaaatctctcggcgccgtaccgatccgaccggctctcagaccgcattggttgtttcatttcccctccggcccgagtccactcttttacctggtgctggtgtccactcttgacgaccagctatagggtctcagctgttgattagggttctgctatcagaggatatcagatcttggtcacctgcagaaaggcatagcccctggttctttttcgtatttcaattagtcctgactcctgcgcttcacccaccgggcaatcatggctgacctcgacgtcgcaagccactacaacctaccctccgagttccccgaggaatggccggcatctttagatgcagacgatgagccagaagaacagccagttcagcgagcagactctcgtccacgcaagtcccgatacatagctcttgaacgcagtaccagtgattggagaagcaactttggttcacgaagagggaaggaggggagagacaatgcacgggaagacgagcccgatcccttgggtacaagcgacagcgttctccggattcttaagcagcgaggagtgccattggaggaagaaggcaaatcacggttcctgctgtcatcgacatcattctcgccagcactattcctatcacaggctcatcactcggcctccattgaatcccttataagcggcctggataacctatcgcattccatcgaccagaagtcggcatcgctgaaggtactggtggaagccaactttgagcgtttcgtccgtgccaaggcaactatcgatagcgtctacaccgagatgagaaaccagggcgttgataaagaaccaagcctaagtcctcgcaggtcagggcatttccggagctattcaggtcagcaatggagcacatctctcgcccccgtggttgttgctaagaagaccgctcttgtcaaggagagtgagttcggcatgaagggtattagaggtccgctagttgaggcctctgtcaaggccgaagaggtttggggaccggctcttgggggtcgggaacgagagaaggttctgaagtcggtggtggagactatggagaagcaccgcgatgtctatgaaattggaagccacttggccaagtccatcaaacaacgtgattatgatgctgtctttgagcagtacacgaaagcaaggacactcgccaaccaggctaagaatatcgcggagcaggcgtccagttcccgtcggcaactaaacgactccgagacacataccattctggctatgggccggatggtgatggacgttgaccaacaaatccatggttttaagcgtgatctctggagacgtcttgccgatgcccccactacatcaactacaagcaccgcctcagggcctgtggaagaacacatggaattaatcggggccctgttggaattgggtgtcgaggaaaaccctatctggaaatggctccagagtcgttacgaattcctgaagacaaagatcaccggattcagtgatcgatgcaaggtcgaaatcgaaattttaagaagaagacttgctggtggagagagaccaacttcgcaggcgacagcatcctatctccgcctggcacctcgtgatggtgcggtagaattaccagcgatcctagatacggatcaagtcattgagctgtgggaatgcatacaaacgttcctaactcgacttctgtcctcgcaaagtggcttgctgggcgaggtcttggatttctgggaagtcgcacaatcattcattgatggcaatcgacaacggcttttgcctgtcggttttgaaggggagagtcgcaaacaccaccatctttccaacgacaatattaagcagttagagcagggtattgacgtgttggtcaatattattcgagaaaacgtcgtgacccttttcacggaacccccaaccgaagatatctccgtactcttctcgccagttccagcaagtccatcaactccagagtcgaggggtattactccgacagagtcccgcttcaagttggacccgaggaacctaccatatcctccgccaaagcttggagagcactgggagagttttgcattctggccaccattttctaattccctgagtggagtgcactatttgagtaaattcctcatcattgtgggcaccgctgcgagcgaaatggcagacctaaggccgattggcggctctggaaaaacatatgacctcctcaagacccttgtcagtattgcccgggaacgatgtgcacgtgtggcgtgtgctgcctggagcaaagatgcggaggtctgcaaaatgctggaagactggacacgcgattcagagaagcgtgatttgactaagatgcctgggttctttgtggcttttgagagtgctatcctggtgggcatgcaaaagattctttacatctcggaagctatggcaaagccgggttccgtggatgttgtcactcagccgcctgcgaaattgcttcaaatggtccgctctcagttcgtatcgagtgtttacaaatcattaagcggcttggtcgaaaacgcagagcgcctgacaacagtagatgaagaaaatgaatggattatttctcgaccagcaatgacaagccaagcgactgacgctgcattgtcggttctctcggctgattcggtcgattcttggaatcgcgtaagtatcggtccaatctgatgtgatacctgcataactgaccacagaacagaatgttcgaatccttctcacactctcaaatctgaaggctctgcaggccgactatgtcccacagcttatctcgaactttgagtcatccttctcggtcaagctgtcggaagaggccaagaccgttcgggacgtgctgagccagattgaagacaggctattccaatcatatatcaccccgactactgtcttattacacaaaacaattaccgctggcattgcatctccagattgggagccgtctgtagataggccggagcaagtccgcccatatgtctacaacgccctgctgatcatggtgctggtccatacagagatctccacaactattccgtccactgtgtcaccgggcgctagtcgcgctgcgtcaagctcaccttcctcgctcctagtcactgtgttgacacacctgctttctcaaatttcttcatcactgctggatgccttccgtgctcggccatccttctcactcccagctttgatgcaagctaccttggacaccgagttcattgcacagactcttagctcgtacataaccgacgaggcatcagatgtacaaagtcagatctacgtcgagctggattgtcgtaccacaaatgaagcccgcacaaaactgaaggccgaactaggagaaatgcgagttatcctaaaacggctcagggatcggacgaaggggcagtttgcttgcttcaaaaagccgagaagcggtggaggtgcaaatagcggagggacctccaagcctcccactgcggccgggacatactactaggtctagcaagacagtactattcaagaatcgtaatctgaataaaaacttttatttcatatccaaccgggtatcatggaaacatagtccacaccatgcatgtgtagttcgtgcctttcctctctaattctgaccaaccatccgctgcacgcgactaagcaacgcggtgctctctctgcctaatctcctcttcccaaactggtccggccgcttcgcgcgtagcagggccccacgctcgttttgtttcgcctcgcgttccttctgtcgtgcttcctcggctttcctcctcttctccgcaaactccaactcccttgtgaatgcagagggcttttgccggcgctccctttgtttgccctcgcctcgtggacgccattctggtttaggtgcaggtgctcgctccccctcgggctcgttcaacatggctatgcgatccgggtgaagttccagagttgttgcctcttcgccagcctcttccttgtccttgccagtttcgacttcgtccccctcggtggtatcgtacacggatttcctaggcgcgatggcgagttcttgggctttgatcttggcataggccttcttcactttggccttgtgaatcaagtcatttttgatcttttgggctgttttttatcgtgtggttagtctcattcaagacatggctttcgggcgtgctcactcttgcgacgatatgtgccatctgggaggtttgcaggtccaacgctaaagcccttgcgcttcttgatcgcgggctcgccctttgatactggggcagcatctccatcgtgggtgcgtttcggtgccatgctgatattcaagcaaagcaaatttgttttgtcttaacgtgtgttgagaatcgaagactttcggagaaggaaaaaaaaaatgtggcgatctccgcacggaacatcggtctcggccactagcaaggaagtatgaacttttgaacaatatacagcacctttgtcttctcggttttggggctaaaagatcgagattgtaggtaattagcattagcaatatcattagcaataccatctacaagctctacaacatgttcgacattatcagtgattctattgagctagtctacgcattatttacttttttctctctatttctccccaacatctcccatagcccaggcatcgggccttgatttccttattgagaccgaaataatacaaatatacaacattcaatatgactcctgaaggctccctatccaatcactgcaacacaacgtcactggtccatcacatgacgttcgcaggccggatctccgagatccacggcgggtgtccaccccattcaacgacacaaagcacacgacctgctcaatactttcttcgcctatcaacctgtgaggttcaaactgggcattcatactttgagacagcagcaaaagtcatgcccatggcgtgacgtattttcctctataaactgttatcttcttctcccaccagtaaaaaccaccgacagcatatacccgaatcatcctggtacaccgcatccaacttggaacccccaccacggcacagctcggctttggtttcaaaaaagtgctacgtgggtgtcttccggaaatgtcacatttagtattttatgtcttatagtctgcccttatcataccaccatgcccctatttcgagatccggatcggaggcgtcattatctatggtcgcccgaccatggcaatggtgaacaaccgaccacagggtcctcgcagctccagctaaatgatctcagtcacattgagggtgaggtagctgctccagaaatgacaaccaactctatgcattcaacggcgttgaatccgcctaagtcgtgggcgaatgatcgggaggagctcatccaccgtatcaaagaatcttcgccttggagacttcaacatatggtatgtgaatctcttcgtggatgcctagcactgttccaaatctctgctcgttgtgattccgctttctttatttgtccaacacatgcataagctaacatgcaaacagtccccggataaggacaacaaagatttatttatatctcaaacttcacgggagcagtcccaaagagcagcaagagagtatggaagccactctctcaacgaagaacgtcatgtcaatgcgacagaggaactgggatcgccggccgatatccagagacctcggtcagcgttacactccggtgatttcagggaaggtgccacagattctcatgactcacacgctccacggtctccctttactgaccggagcttggcttctccatttgctcatttgagctcctcgcccactactccttggtttggagcacaggcgttgccctccggtttacgaaagacaggtacatcgaatgaacaccttcagtccgatgttatcctggatgctcgcgctggtgcaccgtcggtgggctcattctcgtcaagttatgttctgaaagctcctaccagtcctctggtataccaagcgaataacaccgacttggacttttcgtcccgtgttgaccatgtggacgttttggaacatttagacagaaaaaaccgccgccgtactttgccaccagagaccttccgcaatctccaattctccttgccaagcaatcaaattctcaaccctaacggtccatctccacccaaacggcagcatgatgtcttcacaaatcaaacatctttgcctcgccggtcattgacttcatcgtatagtcttcaacttgcaccgacccccggggggcagatcccaccatcgcgagtaagacggccgtccttcgtctctgacatctcgtcaaaccatcacgcgccgatggtgggctcttacgaggaatcgatattacgcgggagaatgtcaatgaatccttccaagccgctagatttcacggctcagattggtgtcctaggcaaggggaattgcaaaggtcatctaaaatgtccgccacatgttacagtgccatttccggttgtcttctacagttatccgacctccgggtccggccgctcaatctcagatgacaatccaagtccctatgtgggacagattgacctggaaaattccctactaaaaggaaattccaatccgactagacgtcgcaggcgacatccaagtctgacggaacccctagaaggcattcccgccacaggtggagcaaatgatacccctgcatgtgctgaatcacgacgccaccgagaaaagaagaatcgcaggtcagaatcgcctaaatgtcccccgggggggtcttaccgcattccgcaacaaggtcaactacaaatcataatcaaaaacccgcacaaaaccgcggtaaagcttttcctagttccatacgacctcggtgatatggaaccaggcacaaagaccttcattcggcaacgcagctattcggcaggtccgattatcgatatgccgctcagtgcacggaaaaattatgggaccgatcgccctgaagcttccttgaatcccacagaagaccctcaggacaaacccacgttacgatacctcattcatctaaacatctgttgtcccgcgcgcggtcgcttttatctacattcgactattcgcgtggtatttgcaaaccgcgttccggacggcaaggagaaactacggaatgagatccaaaatcctgagcctcgatacagcccgtacaagccctcccgagagtcttccatctcgagcactgcgagcgcaaatacgcgcctgggaactgaacaagcgtctcgcagactgagtgtgggccagggagcgacccctcgtctacacccacatgtatcaagcgggttcccctcacagctagatgcgccaagacccgtggatgttacaggtggccctgaaaatgatgctccctcgcatagtgtgtctcggtacaacgagctcaccggaggcgacaagtcttacgaacgtcatgctcgtatctcgaatccgatcgtcccagaatctggcgagagccttcttgccaaaagactccgaggcctcgatgtgcacaggtcggagtccacagtagatgaacgacatccacgcaaattgggcctttatgatcgaccatctcctacccacagccaccatcctcgctgaacgaacccagcgctatatcctccaagaaatttgaccccgccattccgtataacaataacaccatctatctcccacgtatatcttgacctcgacttgacatatcacctcgtttcctgtctataccacccctcaaggaacagcatggcagtaggcgcactggtttgcagccgatcccctgtttatactaactcacatcatagttccgagtatctttattcaccttgattcatgcccgagcgatgtgtgtatttattttctttgccacttcgaagtccagttgatctgctttcattgcctgtgcttcatggatatattagggagcccgggtgcatgcatgggtcgttgactatacccttttctattttggtatcttattctctttctgcttttggccttgacacttaagtttatctgttagatggttaagttggtgatttttagtattgattacatatatctcgctagtgcactgcgtcgctgcgcgattttgactttcgtgtctgccaataggatatatatatagaagttttcagatgaaagaatattcattgatggaatacagaagaagtaagatattgtgaaatgtcagagaaggcgagtttgagttcctgcaatttatatctacagcgctagatacagcaactaaattatccaaaatgacaagtgtcaagccacccaggaagaagaccaagtgatctcgacccagccgacatgatgtattacgattcctttgagtctaagaaaagaaaatttcctagtcctcttcgactaatgaacctagcttaaccagcatgctccacgatctcgctcaccagcacgccgtccttgaggtagctcttgaactgctctggcagagggcactccttggtatcttcatcggtgccctccggcggcggaagggtgatgttaatagcggaacatttgctagtaaagatctcagtgttgagactctcttggctaaggtaaacggtagcaccatcaacctgatccatcagcaaagtggggaccgtgccgtcgatctgcacagcgaacttggggcacttgatgatatcaagactgctgacgagagagtcgacgataagggagagaccaacgcagttgtcgatggcaatagcgttagctttgttagagaccttgatgatggttttgttgcagcgactgatgaggatggactggttctgttgcgcagagacctcgatgatctcgccaggggcatcaaaattctcgatgagccacttgctgccctcgagttccctgcggggcggcttgcgcgcgcgcatgttttcgggcttcggttttttgctgggtgctggggacttgccccgcacggaactgccctcagggacgatggatccggcgcgcaggttggggttcttgtgcgtcatctccgatttgtcgaccttgcggaggctagaggtgataccctcgccctggttgagttggtcgaagacagcgcccatgtctgctgctggtgccgcaggggccggagcaggaggaataccaggaggcggaggtgggggaggagcgccgccaccggggaagttgagggatgggacagggggaggagggggagggggaggaagggcaccgccactgaccgcagcaggtccggccttgacctgcctcaaagcttccatggcatcaatgcccgtctcattgttccatgtcagacccttggggtagtgtttcttgaggtactccgcaagagccttgaagttttgatagtaggctttgatatattcgacgtgtacctggtccctgttaaattgtcaacatggtaattcccccaaagcgtcattaacaggagtgctcacttgtccttgtactccttcagaaccttatttccgtagtattcaatgccaccgatcatgtccgtgacaaactccgcaggcttgctttcgaagaaccaagcgagcgcaacaataccctccgcaacagcgcttaggtggttgaatagcggcgaggctctgtttgattcgcgaatgttgttaatgctatcggatgctttgtgcagatctgtcattaactccggaggctgagtatcgggtttcttggcttttgtaacaacataaagataggtacgttcagcttggaaggcccgaaggacagctttggactatagatccagtcagcaactactcgcggtagactaagttcgcacaattcctcaacatacttgctcagcaaccagaccgccgatcttctctcctaggttgacaaatttctgaacatcacccttgatcaacgcatcgaagtcctcaatctgcggcgggacgggggcggccacaggggcagcgggcggaggaggggacggcttagggggttgtggaatagcgggcgtagaagaaggtgaaccggtcaaagactttggcgcgctagagtcatcgtatgacatcgccatatcctccaagcgtgaggtcgctgcctcgagcctgcagatgagttcgatgtcagtcaagtgtgccggacgtaggtgtcaaacagcgtagcgggaattgagctaagagcaaaataccagtgaaatgccattggctagacactgttcgcaccaaggatacataccgcttgatgagggtggtgaaattatgcatatggccgccggacgccatgataggcaacacgttgcttcaacggaggaagcggaaaggtaaaaggggtgatttgagtaggttgagatccagggattgtcgagaagtaagatcccctgctatttggtaaaatgtaggcctttgagttctaaaaatcgacacacgggatgatagggagtggaaagaagacgaaggttggagctcctgaggcccgcagatgacggctctagatgtggtatggtacgttacagcgggatccgcaggggaaatgacgttgtgggggtatatttggtaattgaattaccgttcgatccaccctgcgataagtcgaaaccccccatgttcggctgttctttgtctttcttgacaatcagcttctttgtcgtatttatacatacaaagaggaaggccttagctgcaaatatggtggcccaagataagcccgttgaggtcgagttctgcaccttgggaatgttcataattggtatggtttacttcgtcgctcaaagtgggatgtagactcacaggtgcattgttattcagatgatattgatttcggcggctcaagacccagtgttaagaatatcctcggtggtgcagcatcatttgcagtcgtgggtgcccgcttggtctcaggctcgaagtatgcacgagctgtgagctggatcgtggatgttggctccgatttccctacggagacgcttgatgtaatcaagtcatggaatacagcctgcgtttttagaaaagaccccagcaggctaacaacgagagcctggaatgggtatcatcctgacgagaaacgaggtaagtttgcggtgatacatattccaccgaggaaacccacgcggtaactgactgggaagacttcaaatacttgactccgaaactaagactcgagcctgaaatgttgtccgattcacaggtgtggtccaagacattccatatggtctgttctgcatcccgttgtatgtccatagtgcacgatattctgcagcggagagatgaattgcaaaagacagggaaagcaccgtctgtcgctcatgcttcccagcgtcctatctttgtctgggagccagtccctgatctctgcactccggaagaacaggaaaagttcttcgccgcaaataaagtcgtggatgtggtgagtcctaaccacatggagctcggcatgatgtttggccagcccggttggacccaaaagagccaagcaggccaggaaatagtccaaaggattacagaatccggcattggccccgatggaaatggcatgctagttatcagggcaggaaaggatggtagctacgcctactcaaagtccggcaagatttggctccccgcatatcatcaacccagtgcttcaggtgctacgcctgtggtcgaccccaccggtgcgggcaactctttcctcggggctctatcccagggcatggtgactgcaggccgagagccattccaagtcattggctctgttctatcaaactccgaaacttggaaagcccttgagtcttggggtaattacaagcattatcctatggcgctcatttgcgcaactgttgcagctggcttcgtggtcgagcaaatcggagtgccacagatcgatattgatggaaatggaaaggaattgtggaatcggactgaattcacggaacgtgtccgcctgtacacgcagcgattatcgaggacatctgaagagtctctctgagaactattagtcaatcgactaatttccgaacgagaaacgctcttgtattgtcgtacagcacacaagtgatcaaatagtagaaaaacataaaagaaaaggttcctgctgaaaatccgcctacaaccgccatccagtatgctggaccttctttatgagtcgttcttcgcggcttgttgtttctcgtgttcccgaatttgcctgctccagctacaagtgaagaaaggtaaaggtcagcatgatatataccgagtgacatgggttcggggaacggactatcggctggggaagaagcggccgggctctggcatcttgtcgcgatgttcccgatcagcgctgatactgaaggcgatagcagcgataccaaacacaaagacgcccatgatcgcagtgttggccctccagttagctggctgggcataccaaccaccagcgggggaccaaacttccttggggtacctgccagatcgaatccattagctcctggtgaggttatgaaaaacacgagcacatacgggatctttccacctccacccattgtgacgaatatgcaattgaagggtttgttagaagattaagagagcgtaagcctggtagttctcgaaggtgaagccgaaagggccgtctcggtcgcaggtctgatgccaaggcgctatgtctatattaggcttagcgccgcctcacacgacttggccatcccgtgactgccgcgacaatttctcttctctctcgttgatggtatgccaattgattgcgtcgcgattatccctcccgtccattgtataatcttttttacgccctcggaataccacaatcgcccaaatgaagagactgcaactccaaagatggagcagttcagtcctttcgccgcgggctcggactgccaaccgtctgcatcaacacatctacgggcaacggtatcaatcgaccgctcccccggtccaaacccgtgatgatccgaccatacagattttcgaggaaccagcagttttggatgagcaattggctcaaattgtgaaggactctcacacccgccactcgcagctccaatatccttctcccccagtcgaagcagctcgacaatctgcaaaactcgccgctctccacgctcgactctacctaccctccagattacccgtcgagacacttgcgcggacactagtcgatgcatcagcagatccgaacccgaatttcaacaatgcctcgctggccactctcggtcacgacctcctttcctactacgcaaccgagcaccttatttgcacctaccctcgcctacccttgaccgtgatctttgccgccatgtatgcatacgctgggcctaagactcttgccgcgatggcacgagaatggggtgttgacttggccgcgttgcccggtggtgaggtcgatcccggtctgttgcagttccagaggcttgagcctggcaccgagcttgcctcaggcccaaaccacccgacagcacggccatatgaagcacagaagaattggaggaaaacggtcacttctaagattttctatgatgatgaatttggtgacccgctcaaggggatcaagcaatctgccgccggtgtcaccaccgagcaagcgagcgctgagttcgtccgagctgttatgggcgccatctatctgcatgccggccgcgccgctgccaagcgattcttcgagcaacacttcctttcacgacacctcaacatctcagaattgttcaacttccaggcaccagcccgtgacttgacccggttgtgcgctcgtgagagcttcgagcgtccagttgccaaggtcatcagtgagactggtcgtaagagcagacaccctgtctttgtggttggtatcttctctggtcaggacaagcttggggagggcgctggcgccagtctgatggagggccgcgagcgtgctgctgttgccgccctcaagggttggtacctttacagcccactttctgtgcgcgttcccagtgcgatggaggagccatcggccgcaccgtggaagccggtccacgttgacctgggcgaggtcattgtttaaggtatttgttggtgcaatgggatgccttggttcaaggcacggtaacatattatttcatgtccctttttttctcatctcgcttttctttttccggtgtgctattctttcgcatgggaagctagccggcggtaaaaagagtcatctatcctgtctcctgcatgactggatcctgtacattatgggaattccaatcccttcgattcacctggtgtctttttctgctaaatttcccttattgttttttttaacctctgttctactcttctccagttagacatccggaaaaactaggcatgtcatggccctcgctttggccctgccatccaaatatagaactgctctcagacatctattgaatgcatgaaaaaatcaatgttaatggaagctctcttgtcttttgattctgttagttctatatctctagttactaccaaatgaatctaccgatgcctacatatctattcatctagactttacatccacccatcattccgggttgagaatctcatcctcccagttcccactactcctcccgacacacacctctgtaggatcatccagataacgcccatactcttcccacaactccccaaccctaaccccgaaaagacccttccagaacccgataccctgattgtctgcatcctccccttcaccaacatacccaactctcaaaagccgatcattcaacatccccacagcgcccctcccaaccctaacatcctcgagccacgccagaaaatacgctgtatgctgataccccatgtcccacttcggcggccgttcagcagcagatagaggccgtttccagtgcggcggctccagaccagccttgagccgcacaaagtcagctatgccctcgattagtccgcccggcggacgggggatgtcctcgccgttattcttgagggagctaggcggcgcggtgtgctggtagcaatgcacaagctcatgggtcaagactccgaccagctcgtggagcgggtcttctttcgcagatgggccggatgtacagtgctggatgtacgggagcgagacgtggatttccttgtgcgcatcgtcgagctcggtgcctgttgtgtaggctacgccactgtaatcgcggaggaagactgttacggatcttgttggcgggatgctgggtgtgaaaatgggccggtgggggttctcggactttgggggtgaagtatataggtgtttgatgatgttcgctagggctctgtcgagtgttgatgcgaggtctgggatgaaggcgaggaaggcgcttgaggcgggatggcgtaggtcctccacgtgaagacggagcttcggttgggggactggtaaggtgaggttggttgttaattttgtctgcttttctcctttgctgctcgaggtctgtggctcttgctcttgggtgttgcccttggggattgcggaggcatgaggtgcgtgggcggagctcgtcatgatgtatttgctttgattgacagcgatcaactgggcagatatttcgtgttaaagatcttcgactttttatatttgtctgaggtgtaactatggaagtttaggttgagggcggggggattcaacgttataatgactagacccgcccaggtctagggcctaaggcaggatccatgagttcatatacctatatgcacatcgatatctgataatcgtatgtataagccagctaaacctttgaaggcgcttacctacatatataacgtacagagataaacctaaatactttaggctagcactctcaaatacacaccttgtcggcgctggtgattctcaagaggccgccatgctccactttggcgatctcgtggggtgctaggagctttgattcacattgattggaatgaaagaggtgtatggagtaagattcaatcgatcgcgtgtcagttgagcctcatattgatctttatcgtgttagacaatgcagtgagaagcttgtagttgtttactatggcttgaattaccatttttatgcctttttttcagaaaataggcaaattggtgattcaagatcttttactgagcaaataatcggtttactggtgagcatttgacatagagatgttgtaaacatgacgctattggttgcctattgcgacgagtgatcctaagttaataaacaaaccagtgttgggctcttaatagaaccttcgggcacacctcaccatgtaatggcggctggatagaattagacaggtataaacctaggcaggtacttctgaggaagtaacaacccccaataaaagttgaaggactcaagggccacccctttaatatcatctacatccctcgcgcttatcgtcacgcgcttatcgccccttgttttcactttgtccacttttcaacatcccaccatatcgaggtcaactttgcgctcttcctcatattcgtcttctatctcatcggatcctgtatgttattatcctccctgctctgttttgaacccttcatggtcctcttcgccattcctcccttcccgacatcccacacccttttgcgacagatcccgattcccatcctataaccatctgataccctcactctgtacacacgtccacgctatcctttcgcaatcgcaattgccctgcttcttatagccattgctctcttctactggtagaatctgctgctaactttcgtcatcgctagtgacaaatcgaaatccgagtctgttctcctatccgctattgaccttatcgcattttgattctcctggatcgtccattgcatacacccgcattcttccgtctattcccttcggtgcctgccgcgagttgagatcgatatctcggtgtttacaatggaggcgaaggcagcagaactactagcggccttcaagaaccccaacctgtccgttgattcaaagatcgcctacctctctagtgtcaagtccgatatcaaacagaaaaatgttccagagggggcgattcgcgccattttcgaaacactacgcctcgcgatcggctcccaacattattctgttctcggggcggggttctccacactcggtcacctcctgaagcgccttgcaatccaagaccagcagcaatggattgttcaccaggccgagagcttgtatcccattcttctagagcgtctcaatgacccgaaagaacgtataagagcccaggctgcgtcaatatttaccgaattgtggccatttgcgggtgacgaagtcgaatatcatgttctggaaggtgccctggttggaaaaaatcatcgggcgaaagaaatgagcatgctttggttggcaaatgtaggcttatgcaccctgcaaggtctgtctcaggtactaattccgatctacagatgacgaagaaccatggtttgttgttccgtcaatatgttccttccctggtttcgtgtttagaggacgccgatagcgccgttcgagatacggccaagttggtcgtgattgatctgttccggtgagtgaagttatcactctaatcattattcacgaatgcccctaaccgaactcagaaacggccccgcaagagcgaagtctgacctacaaaaacaaatggcgacacgcggtgtgaggaaatcaatcgcgaatgctatcctctcaggtattggcttaggatctgttgaacccgagactgcatcctctacgcgtccaatatctcgggctgaacgctcgatttcggtgatgtcgtcacgttcacatactatggaacagactgatgatggttagtattctgattatatttgtacccttggagatttgcactggttgtactaacatgcctgcagagatggagcctgtgaaaagccgcccagcttctagagctcatcgtgagcgaccggcagcctccgcatctacagagccaccaattgttaacagaccccgcacgccggctccgacaccagcacctcaggaaccgttgccaggcgatgatggtctagaaccgtttgatgttgcctcagcgagggatgtcgatgatcttgtgcgcgatatgttgccctggttcgaaggcaaagaatccgaggacaattggtcaaagcgcgagaagaatgtgattcttttccgcagactcactcgaggcaacgcgccgcacgacttctcgcagacctatatcagtgcagtaaagacactccttgacggtatcctaaaggttgtcaactccctaagaaccacaatgtctagcaacggcagtcttttgatccaagatattgcccgaacatgtggccctagaattgacccaatggttgagattatcatgcaaaacctgttgaagctctgctcggcgttgaaaaagattgctgctcaaaacggaaatgtcactgttgaagtcgtcattaaaaatgtttcatttagcgttcgcctcctgcagcatgtctgttccgcaacccaggataaaaatgttggagtgcgtttgttcgccacagggtggctaaaagctttgatcatccgccaggctcatcataaaagctcagttgaacataatggtggccttgatcttatcgagaagtcgatcacaaaaggactgggagatgcgaaccccggtgtgcgcgaagcaacacgggccacattctggacgttctacggtgtgtggccggagcgagccaatgtgatagcagacacactcgaccccaagtcgcggaacttgctggagaaagattcatcgaaccccaacccatcttcaagaggtgcacctgcattacctacaaagagccccgctaagagtcgcgccgctttaaaagaagctattgctgctcggaagaaggcacagactccttctcaacccgagttggctcagccaacctttgccgaggcgaagccacctgctcctaccttcaggtctactcggagtgtgcctactggggcccctctctcatctctatcttccgcgcctatgaggcctgccgtgaagcctcggcgggcagagattagtcgacctgcaaccgcagacccctacgctcgtcgccccgagtcacgagcccagtctagtaaccaatctacccgacaagcgacaacttcccccagggctatgaggtccaaaccgtcaacacctacgtcaagggcccctctaaacgcgcctcgcactcggccaaatgaatcggcacaagctgctacaactaatggcaggccgaagagactcgatttgtccaagtccaagtcgcacagcgatctcatggccgcgagtcgtgctcgcagtgactcgaatgaaagtctggccaatcagccatctgcaagaacaccccgtaatggaatttaccccagtgcacccgaggacaaacattcccctgcatctatcctattggaaagtcctccgcttgatgcaccacagcctcttctgtactcagcaccgcatggtcctcacgccgactcggttcctgttgaagaaccagaaccaatgacactggaggaacctgttattgccgcaccttcaccttatatcccggaaccagatcttgcagggtctcctgtgcccgtgtctccggctcagcattcagatctggattttggttctggtcccgtatctgccgtcaaacccctgcatgaatcaatggtgatttacgaagatcctacaacgcccatcgcggacaaaaatgagactcctgggtactctgcctcggtgggcaattttaccccctcaaagtcctcccccagtcgcgctgatcaatccgaacatggcggagcagaagctcaacttgtctctgaaaatatctcagcatcggtggtcgcttccgctaggaaacccacacctaatttggctcctacgcaggaatctgttatgaacttagaagctcgaactccctctccaacccgccgggcgccacttcaaccaagcccgtcacctacgaggggccgtgcccagccactggcctctaatatcatggatattgaggccgtgcttccccaagagcatcatgcaggaacgaacgaggccggtggcaacaatgagaatgcgactccacacctggccaagactgtagacttgcccgctgtcccgcggtctccagctaagccgagtgtcctcgaagaagtgacggcaaacgaagctacaccgcgttcgccagaagcgagacagaggtcatttgagtcgataccaccatcactctcccagtcgacgttgtcccaatcatcaatgtctgaagattccacacgacgcactcgaaaatgggtagatcgtcaccgcagccctagcccgcgttcgaaggacccggctaatgcccaagaaatgatccataaaggcctggcacgtattgtgtcgagaaccatggagccctcgggatataggaaactacagggacttatccaataccacggcgatgagattgtttcccaaagccaggactacaatacgttgctggaggctctatttgtggaactggaagcgacgccttccaaccgcaaggatcatgacgtaaaaactcaggttttggccactattcgttccatgctcctacgaacccgcgaacatttccacccctatgacactcgtgctatggcagctattatcagggcccgctgccactacgagtccacttcccactttgtcacttgcttagaagaagttgtagacaaactggtgtttttaactttgccccagacggcaattgtcggtgttctgcagggactagatcttggagcagatgcagagaatgatgagacataccgttccaccatcatgggcctcagtactattcaacagtcgctatcgcgtcccggtatcgatatcgacgacgagcttctggctcgcattggagctgtggtgatgcaacagctcgggcacccgcgccctggggtcagaaagaatgccactgagctctgcacattcttgaacattacattcgggcccgagcgagtgcaaaaagtcactcaacctcctcgtgaaggatcccttaatcttttgacatacttcatggcccggcgaacccagtaattgttctttttttttccccatcagctcaggatcctcttaggaggaccagcgattagtctgaatatcatcatacccatatcaggcacatctcacattcttcactcgtatccatatcgtactaggaaacccctcaggggattgtcctaacaggagcgaagctcagccctgggcagttagaaattggattttaagaggggatccatgagtgaatgggatcatgaagtaatgagatatatagggaagagaagagaggaactagccacctgaaactatacaagagaaaaggaaaaatgaggcatgtgacctcatctgcacactgacattggcgtgcgttgtgcaagtcggatttggtacacgctttgcttcatcagctgtaggtggtatagttccagtggtttggcttttccacgccatcatacaatacccctagctagcttttgacttcttccccgactttgtctttgggcatatctgttttgggatgcgtcttggtctggcgagtggattgttgaatcaacgctatgtaactacaaaaggtaagaaaatatttctgcggtccagaacagtgactaatagggatattcctcgaatctaaaattccaaagagttttcgccgagtcatcgaacccatatcctttggaactggtagctccaatatgctgcagtaaggacgggatcactgcccagcgcgtccagccctcacgatccgctatcttctccaccatcatgtctaccagccaatcggtcgtcaggtccgtctgctcaaggaactcaggtatgatggaacgaggaaagacgaggccctgcgagcagcacccatatttgttcatttcatggacgccacgggttatgggccacattgtctgtcttcccgccataaaatggagcgcaatggcagcggggatgaaaatgcaggatgtgatcaaaatagcgttggttggaatagtcttcagtttggtcctgaatactgttttggaggcaaccatcgtgcccgtaagcagagcccagaccatgaacgaccaggccaggtatgccggccactcttctgaattccatccaagaagctcatcgacataaaagagtcgcatatatatccatttcttattcatgttccgttcttccacaacttcgagagcctgtaaagcggacgagccagcccttcaccgccagagtatcatcttcaatcatcgccacgtaatcagcgccagtgtcgtaacagtctttcaacaaatgagtatagtcgtaaatcgttttgtttcgataccatccaccttcctcccagtcttttatacgctcaaaatctggatcatcttctttgtacgtcagcaagcggtctggcaacgtgctaagccacttctctgagtaaatcggatgttttgacggatctgtgttaccgatgagaatgttcagataaatgctcttcctctctgttttgctaagaccggccaggagagaggccactgttaagcccgtatattgctctctacgagagcgacagttgctattccaagacatatagtaggggtccagttgtgcggtcttattggtttattgatgctaccagtatctctttgaaactcctctgcctcctcgattctgatggacgaatatcgccgctcgtaggcacgagaggggtcgaaaaaataagaggtgggatctcgatggctggcgtaatgatagtagtagaggcagaggacgtaaaggaaggaccaagtgcaaaatatgaggttggtaatcgcaagatgaaatctcctggggcacacaagatgcgacgatcagccattctcgcttgcagtccgttgggtgaaaattatatgagggaggtgttggtgacgaggaataggggtaactgggtgtaccaggcgcaacaccccagtatcaaggactagcaattattggacatatgtcaagtgatagatgggcgattagagattaggttgaggggtagatgtctgaccatctcgaactgggtggtgttcacctgcgactgggggtctatgcccttcggggtatcgtaaatccttctctccccgtatactcgtatccgcttcctacggcggctagaaattgattgtgattggttaagaatgataagctatatactgtaggttgagtttatcggaatgccctcgccctatacagcatatacatcattagccctccagggcggctacacggcagccccacatgggattctctcaaatatacggacttaggcaaagatgcagattgcatgcgttagggtgtttctgattattttctgaaggactacagcgctatggtagcttggttggttaggcaaacacgctgtcggccattgcagatccccaaagcccgggtaatgacagttctattactccgtactccctatagcatggacaataacagcaggtttgagatggtataatttctttacggtcatttttaccgtcttggtctcaccttctcagccctggagactttgattcttatcataggcccagcccctgtctgaaaattcagtcgcagcgttcctagtttggacagtacctgccttgacatagaggtccaatcgcaccttccccagggtcagttatatgcctaatgtataccttccaccttctcgccggatgtttcctccttctgtatttatactttgagtcggttaaagtagaaagagcatcgaaaacccgaggatccctacagtcctagtccctgtcagagcagaaccagtattctctgtttctacagcccaccagcatataaacaaggctggtaggagatacaaagcttctttgcgtgcccattttcacaacttctgcgttacaaacaaagaagcaggcaacagtctcctctacaagggtattgtgatctgctaatcggaattcaatttctgatagacacaaagataacaaagaggtctttgaaatcaaatacagtattggtatgcaaagagccagagtgaatagtctatccggactataaatcgccctctttgcctcgaagttggtatctcatcagcattattttcgagtacccaactcgataattattctctaaccaaacagtgaaataccagcttacatcatgaaattttggaaatgcgtcaaaactccaaagcagccgcctcaaagattcccactcgaggtagcggaagccttcaaacccgaggaagagatcatccgtcgattgaatcgtaccggctcttccccaggaaatctcctttgtttattcccggaccctacacctagaacaagtcttaaccagttccgtttccagctgcaccgagaaaacggggttctacccggcctcgtcggttacctcgagaagtatagcagcgcctcgcacttggtctggagtatgtgtgctcttcttgcagatagcggtatcgatccagactggacagatgcatttgagatgtggcggccacagtggagacagttcgctaacagttttgaaatgcagggaaatatctcgcgtgctttagacattccaccctcaccagtccgtgtaatgtgcgttcgaaaacctcacagccttgatatgtataagctctatgccgttaaccccaaggcgaagaagcgtgatcaagagggtctggaggatctctggaggtggatgcttgatgcaccacccgaggtgattcttcagggagctttttccattaagcttgaggttgagccttgtttccctggcgaggagatatcgtttgctgtctctagtagctggtatgagtaagtttactgcttcgctgcaccatccctttctcttctctatatttcgcgatccaagagccgctcagtggtattaaatagaccaaaaataaatttcaattacttcctggtctgaagtctgaactgtatatataggcttgaggcacaatattacggagtagagacatggaggttcgtcggattaccggatttaacggaatatgtattccgggtaaaatgaggggtgacgatcaggtgacgaaccccatactatataatcaattccagtttccagcttgaaagagtcataacacaacacaatatacatcctttcttgcaatcttccgcggtagatataaacatcatgtctgacctacccaaggttcgttggggtatcattggtatgtctgtatttattcccaatggctctaagtgtcgtggtaagctaacgttttccataagctaccggcctgatctcatcgtggtttgtggaggatctggttttcgactggccagaaaagaaagttgagcatgttgtccaagcaattggcagttccaatcttgaaaaaggccaagcatttgcgaaaaaacactgcccgaaacaaagcccaagcgtctatagctcttatgaagaggtctatcgcgatgcagacgttgatattgtttatataggaaccccacatggggttcattatcgggattgcatggcggcgatttccgcagggaagaatatcctgtgcgaaaaagctttcacactgaatgccaaacaatcgcaggaggtattcaatgccgctcgtgagaagaatgtatatgtggcagaagcaatgtggctccgacaccgaccgcttttcaccgaacttcggcgcttgctccatgaagagaagatcattggtgatgtgttccgggtgttcgcggattttgcgttgggtattgatgttgccacacgtccgtccacatcccgatatcgcgacctgaatttgggagcggggtcattgctagatatcggagtgtattcgcttacttggacgagaatggcactgactggaaatgggtctgatcagtcagagaagccgcggattgtggccgcgcagagccatgaagcaggaattgaagagacaaccagtgccatcttgcagtatccctcgactggaaggcagggtatcgttacttcaaccaccaaagcccccggaagtcccggtcaagtctttgcggttatacacgggaccaatgggtacgtcgaggtcgagggtaggatgccatctgcgccggaatcctttactgtgtggaagaggcctcaagggaatcccgaccatgcgcttttcccgagggaacagtgtcaagggaagaaatacgactttccgcccctggggcgtggctttgtctatgaggctgaacatacggcacttgatatcctcgaaggccggaaagagagcaggactatgccgtgggcggagacaatttatatgatggagatcatggacgagatacgacgacagggtaacacagtctatcctggagagtgatggggctctagatatgtatctttgttctaagggtatcaaaaaatatcaccggaaaatacatctaaaagcaatctgtaattgtagatctatatggatggcagcagcagtaatatgaaaggcacactggtaaagatttacgtatgaaactgccccgctctaaggttaaccttgagtggatcccggcagtcgtccacccaggtggatcctatgcaacccggaagtctggtggtaatctactccgtacaattgatgatattccatatgccactgcgctgtacgtaaaatgatagggcgttttggggcgattgagcgttcttcctcgaaaatattcaaatggcggtgagcgaagcgaggcccttccaacaatctgctctcattgttagaaggttctcatttttctttcgtacattatctgctagttccgttgaccctcctaacctccttcaccaatatgacgaaatatgttgtttacggccttgagagcgcaatcaatgctttctttagctcgagtaccactacaacgagacagcaatgcgatgacttcgccatcgctcgtgctggtggtgtctctactcctttacagatgcaaggagtgtgcagttatacagtgacagcgggacccgacaagtccaggatcttccagtttcgatgcgaggactctacgattgatattggtaatatcagtcttgccaaggcagtccatcccgagttcattgccagctgcaagtatctcgggaccttcggcaatttacagccactccatatctacgagatggagaacctgtctggaatcactcatatcatagcgcgcattccaccaggcgacatgtcccgacaaagtaataccatcaaagaccttgctaggtatgtctaggaaatttgtggcctcgttgacaaaagctgacattatcgaataggttctttgcacagtcgtggaacaacgatcgacgaccatactcagatgacaccgctatcttacttaaggagtttcagtctaattttgaccttcttgctcaagacctgccgtcccgctttgcaccgaacttagatatggttcgtaaggagctcccgttactcttctcaggagcgctcccatttgttctcagccaccaggatcttaacatgatgaacctccttatcgatccagaaactggaaatatgacagggattgtcgattgggcggaatctagaattctaccgttcggtttcgcgctttacgggcttgataatattttgggcctgatgggttcaacggggtggcactactatgataaccaccgcaagttcgagaacctcttctggaaaacctttcgagaagaagctaatgatttctccgatgctgatttgcgtttgacccgcgttgcgagaatggccgggcttttttaccattatggattcttatttgacattaaaggtacggtggaaagtgtgcggatggaccaggctgatggttccctcgcatatctcgatgctttctgtacttcttgttatgaaggcagacagcgtgggtgacaaggtgtctgtttctattatattgaaattatactgcgaacatatacattggtagtcggtcaattaagtagatatatcacactagaaagaaatgattatagtactatagggatgcaaaggaccagatacctggtttctaggcgcagctcctgtactctgattccccgcttcgtacccgcgtcgtgtcacttggcaagggccgggtattgtcggtgggacctgtatcctccatttcgcataggagtcaagtgtctcttcactataaaccatacagagtttttgtcatttttactttcaccggctactcatgtatagatgaatcttcatcttctgtccttaggcaagaaatagaagtatggagaatgatacataattctagaaactgttacggatagaaatgaagcatagaagagagagcggaggcaacgacacggttgatctgtttgcctcgagttacacaaatgcaattttctcatctgaaacattttggaccatgaaagaacatacgagtagaaatttaatttgcaaccataaaccgagagctccaatcaccgtgtaggaaatagactttccatgctgttggattcgctgaaccgttcccagccagttgatgtattcgtagcccgaatccagtagcacccagacccattcttcgtcacgacagccacaggcgctattgtgatgttccatgtgtttacaatcatagggctgacaaatatgactgacgctctttgcccatgaagactagcaccggagaaatcaaggcccgtataatcgaatgttgtccagtgggataccacagcaaagcctagatttacagtgccacgtagcgctaaggtgaaagtcttggatgtgtgatcttcggagaatcgaaggctctgctggacagatatcggagatgtatattgcagtgttgcgaggcgtatatctcgtgcaatctcggcaaccgattcttttttcagctgctgagtagagaatttacaccgaagagcgccaacactacaacgaatgtagtatgtcccggccttcgggggttcaagaaagcggcgaaagtttataatcccaaagtagtccactggattgggcgatatagctgaaggttgaggggaatagacggatttaagataccatgcagcgataacatcatttcgtgtaagttgaatctcggaggaacaatctttcagctcagtctgtgatttcatccgcaattcgtcgacccatgcgcctggaatgtagataaacttggttgtgaactcctcaagtagcccaaacttcatagcaaggatagtcagcagcacatgccaaacagtcattgctagtttaaatatcccactgtcataattttgcgcatgtgtctggtagtggaaattggactccgtttcggtgcactcagttttgacttttatcagatcagacattcggacattcccggcatcaggtggaagagcaaacaaagggattggcctattagacaataggtcagaaaatgctttaaccacttcccaacaatcattgccgtcacatatatggtgcgttattccaaaacagagcaaagtagcatctcgtagaagagtaacacgaagccggaaattgtttgtgcggctagtagagacattgaatatgaatttgtcatcaactgaagatatttccgggcttttcatgatgtttggctcattgctatactggtcgtggtggattggaagataggtagccagtgattcatcaatagccctgctagcgaaatcgacagtagaaccacaggtgaaggaccatggctttgtctataaaatgatatgagcaggctgtagtagcggtaagataaactcactcacatccttgattagatcaccgccaagtattggccataatccaactaactcggtgagtttccccttcagaatagccgaatcgagaaccgcatcgacaatcaagcccgtatagatggtacttagatttcctaaagagctaacactgttgcaagtgtatttcgtagagcccaattttggaccctccatttttaggttgagagagactgagatggggtgagattctttcgtatatgaattattgagagagttctctcggggatttgatagaaaatgcgagtacttttgtactcctgtacccttttcttcactgtttattacgagtaacctcggggcaaatagagattatcttctagatatgaactgtaggacatatgtagtactaacatttatttgcttttttcctttgtttccccttttcgtctttgctgctattttactcgatcattaaacatcgtaattttttcaagcacatacagcgaatgtaataatacattggaacggggacaagtctcgtggaggttgaatagactcctcgtccttgactcaattggcgattacaatctctttgctactgtctggaagtctgcatatggtcctgaacagggcctagggcaatatttcttacggcagcggcgtttacctcactacaaccggcttcacaatgaatatcaacaggtggatcgtccgctttggaagattgaaagagatgaaaaggattactttcgaaaggacttcagaaacacaatagctaagaagctgacgcttgtgtcagaatggaagacccagtatacgcacaatgatctactcagacttcggaaagatatgtttatcgcttctcccaaaatgtggaagtggatccaacaattcatacaggactgggaagagatgccttgatctgctccaaaaatcagaattcatttttccttcatttttttcatgatatctactctacgaagtttacggatacaaatcagccattcatggtccatggcatgaaaagcacgaagccaacagccagatggatcgtattccaactccaattctggctagtggtaggatgtatataaaccgaaaacaaacatcgtgggagagctggggcattccatggttgcatggatatgtggagaccccgggtccactaatatacttcccgccgggcagtgaccaatcacattgtaactaaatgacccacactgtccgacctcaaatgtagacgacttcgaaggaaaacaaatatgtgcttctctttgattgagttatccttagcgcaggggccatgctaacttttcttctctatattctatgtcaccatatgcacgagtgaagtagagctcaatatagcccctgcctcaagggtcggctcgggggtcatcttccgatctcccccagcaactcgggtcggatgcggggtgactgacgctaggcactccaactgcccctcgctcggtaccactccgtggtacatcacttgattgaccgtgacaggtttatccggcagcatggaaatagaggggaagacagagggtataagaactgctggcaacggtcggcccttgaagcagatagcatacccctgggtcgttgcctgagctgtactgctataacgcctgttcaaattttgtgcaaatctaccataatcaagatggcaacaacattaaccggcggaaacccacacatcattcaactacccaaaactcccaaaactacctccgacgtatcccccgatccgcaaatcatcgcccagcaatggctttcggctctcgaatttcaaatctcccgtccagaaaatttgaacattagagagctattccaagctgagtcctggtggcgcgacatgctggcgctggactgggacatgcgcaccgtacgctcagccgccgagattcaaagcttcctgagcaagcaacaacccaaggcaaaattgtccaaatttcgactgcaggatacgggcaagtttcagccacgtctggagcaggtcgtcgacggattgagctggatatcttccatattcttcttcgagactgccgttggcactggaacgggtatgttgcgtttaacccaggcagagaatggagtttggaaggcctatgctatttatacgtcattgcaggagctcgactcggctcaggagcctctcgggaagcgtcgtgctgaggggacgaatgagtcgatgcctggtggtctggctgggggcacatggatcgagcgcaggaatcgacagaaggagcttttgaatgaggagcccactactttaattgtcggggccggtaaggaatttctatgttaagacggttgtctgtgattgagatactaacagtcaataggccaagctggattgaatataggtgcacgtttacagagcctcggcgtgtcgtgcttaattgtcgacaagaacgagcgcgttggagataattggcgtaacaggtaccgggtaagcgacattgaaaggactcgatctatgctatggagagaaatactgatttatcgcgatgcagacacttgttacgcacgatccggccgaattcacacacatggcctatctgcccttcccgcagaactggccacagtttacaccgaaagacaagctgggtgactggtttgaagcatacgccagcattatggagttgaatatctggatgcaaacctcaatcgtctcagcagagtaccacgaagctgtaggccagtggacggttgtcctcgctcgcagcgacgggtcccaacgcaccctccgacctcgtcaccttgtatggtgtacaggacattcaggcgaggcaaaggttccctccttcccgggccaaaactctttccagggtaatgtgtaccacgctagccagcaccgcgatgcgtcggaaagtgatgtacgtggcaagaaggttattgtcgtcgggactggtaacagcggtcatgatatcgcgcagaacttttatgagaacggcgcagatgtcactatgctacagcgcagcgggacatatgttataactgccgacaagggtgtcttcatgatgcacagtggaatgcatgaagatggcgggtacgttctcaaagtctttcctatctcccaccccatattcacataatattaataccaaacgtgtaggccaccgaccgaagaatgtgacatcgtctgtgagagtctcccctggcctgttcaatttgctttgagtgtacatatgacgaagaaaattgccgacgccgaaaaggagaccctagatggactccgtcgggctggctttgaacttgatttcgggatagatggcgctggcatttcacgtgcatactttacccgcggtggaggttattatatagacgtcgggtgcagtcagcttatcatcgatggcaaaatcaaggtcaatcacaatccgggcggtattactggctttgggactcacgggctgcttttggcgaacggtgattccctgccagcagatgttgttgtccttgccaccggatatgataatatgcgcacgacagtgaggaaagtcttgggtgacaaggtcgcggatcggtgttccgatgtttgggatctggattcagagggagagcttcgagctgtaagctgccatttactccgacgatcgtcttaaaataaatgctaatcacactgttcagatgtggcgccccagtggccatccgggattctggtacttcggcggaaacctcgccttatgccggatctactctaagtttctcgcactccaaatcaaggctgtcgagtctggaatatcaaacggtgtacgacagtagatggggagagggcctttgtgattgttcaaattgcatttcatgtgtaatcaaagaaatattgcaactttgatactgcaatttgacacattaatattatctattccgatagatgaataaactccgacgatgcgtcataccccaaatggcgtgtcgcaccacagtagcctctcagcttccagctcctcctcatatgtatctcccgtgaatgcatcactaatgacagcttgtatttctcggggcggctgcgcatcataaaaaagctttgtaaaatcccaatattcaggatagaagccggcaattcccagtccacaattgcagacacgcgcccaaggtcaataagaatattgctgggactcaggtccgcatgggtgaagacagaccggtacggacgcgcgtggacagccgcaatattttcccttgtcgcattgagctcgtatttatggatgaggaaggaattgaattcaacagtctggtaaaacggaccacatatgccggaggagaaacaataatcaaacagtgggccaccaagagtgcctccaaagcagtacggggtctgcagctcggatgttttagcaggggtcaaaaatgcctgcagaagaggataaagagagccctatagtagtttggcaatttagttagatttctgtttctcggtctgggctcaaaatttcccaataagcacctacctccggatccatgtcgctgtcattgaaaaggttcaatgggatcacccagacatgatcgaaccgaacggatacattggggtccgatggtctctggtctagcataagacagtgtgaattgcctcgagcttcaacgagtgtttgtgcttgagatgagactgagtctcgtctggtgactgctcttatgcttagcggagatatggaggccatcgggcattctggggaggctggttttcgactaacacttcgtaaccagtcgcttccattcaatttttgactcatccaggacttcctccggagaacaagcagggcgatcatgaatcctttcccagatatagcaagcagcatattctggatcaacggcctcatctaaaaatgctctccagatctcgtgctcggtgagtgtgagctgggcagattcaatgagccggatagtcgcgtgatacctagctattgaagattgaagccattctcggagatgagcgaatggtatttctatggaactatatcagaagctacaataaacctattgtggttccgttctctctgatgttggtccaactctgaagtcggaccgttggatgccaaggtcggatggacctcgggctaagcgctctcccaccccagatcgtggtaagtgatccaggtgtcctcccttgctgaggatgatctgccagagatgtatcgttctcttcgtggggctttgcgacctttttctgtctttgaaatgacgtgcagattaatttactccagttttggaaaagtttggaaaagtctaaaaaatactttttccacccgccacacgaggcgttgttgtttaccttcctaaaagagaagagctaaccggacacgtgaccggctttttcgttcaccggcaaacatatccccatcaggaatttgacaggcattcggaccaaacccaagccacagctacgaccgatacacctcggtaggttttcgattccgttgctagaaggcgtggttggttagcgttgtattgttaaaattgcataaagaaacggcaatcatgagcgaaagagggtcggaaattgtctatcgagcggaaaatgtcccaattcgcttctttaaagcatgtcgatggtgcaggagacaaaagatgcgatgtgatgcgcgcagccaagtcccctgcttccgctgtcgttctaccggccgggattgcattctggatccgatcgatgatggccggcgacgaaatgatcgccggcggaaaacaacaacccccgcaaggtgagaataaaattatcggtcttagaaatgagaacagcgagctaatatactgtcaaagaagcactgcttcgccgctagaccctaggacgggataccacactccggtaacaagagatcaggggttctcgcctgccacagtgcaagacggtggttttaccactccgattgattctttgcccgattctactggattaggcagcttacagcggtcttatacatctgatacgaatggaccggaatctcagcagcttagccccaatgaaatgatcgcgcctgcgtcagcggtacactctatgtccgtgaatttgctagacactaatgatgtgagccctaatccaaccatttacctaattggcattattctaacatagcaagatctttatggaaagctctgttaagggtgaccctaggggggatgtcgtcgctagaggaatcgtcagtgaggagcttgctcgtgtcatgtatgagaggtatggtactgacagccaaatgaaactgcaaacaattataaccaaatctaactcctcggctcaaggttcacgggtggatcgaagaactttcttcctctttttgatccgatcagagacacattcgactctgtccgttcaagatccttgttttgctttacggttattatctatctggctagtcgcgctgtgacagatttgcgcggagacacgcatatgcagcgtgttctacaagatgaggcacaacgtttggccgaagacagcttcttcgagcgacccactaaactagaaacagtccagggaatgattctcctggctgcctactctgaaaagacatggttctcgattgctcttattcttcgcaccgccttagattctggattggagaaatctttggacactttgctgtcccaagaaaatataccccgaagttcgctctcagcttctatggctgatcgagaactcgtatggaagacaagaacctggttgatcactttcatattggagttggacgtcgcatctggtacgggacgcaaatcacgcattgccgaggtcgatgtggtgaagttgcgcagattccttgactatccgctctcgctgccctttgatatgcgtactgtctgtattattgagcttcatcaacttcgaggtaaagcgaacaaacctacacgtgcgatttatgtgtcaactattaacataacatatggcaggcaattctcgtgtggttattgataacacttcaactgttagcgatattgtgtctacagaacttccggccattatgacaagattgcaaaactggtggacgacatgggacgagatccatgaaagtaggttggcctttcttgctttgatacaactacaatccggatcaactctgactcgaacaaatttgaagacaatggttttcatataggggcgtttcaacgcagcagtctcaagcttatgcttctctatgccaggatctttgttttctgtgcttcactggcacggattcaaaaattacaaccgacgtgcacggattcaaactccgagatccttgaccaggatgtgatgaatctatggcagtcccttgttacgaccatcatggaccaattaaactttttgatcaacgagccatcttatcgctgtcaattaccctgggcgccaacatatccagctctcacaatcgctttcgtcagtaagttgatcatttcctcaatcggttgcatacaatttgctaatacagacttagcaacattccctcttcgcatcgccagatggcgtccaaatctgatcaatcaaacccttctacttgaaagagcagaaaagatctgcgatttcctcaagcaaccaccatatcccgatatccaccggactgtttccatcttcgtcaactacgcacgcgccttgattgccagtcagtgtccgcagaacaataatagtacagatgtacccatcgtgtccggtcaaagtgagggcccgccattccagggagctgataaccccatgatcaacggcccgcctccatcaggggtgggtcccctcgaggatctccgctacagaaccggcccgaccattcaggcagataaagtttcaaatatggtctcaatgccaagtagtgacccatctgcagtggctagagcgccggtatctcggctatccggcaccatggaagcaccgaactggactgtatcaaactctattgcagattcttttggtctgtttgaggaggggcaaaacgatatctttgatttcttgcctatgatgccatcgattccacagtaacaactacatacctaatacaacttattgaatattatcactccgattccactgtccagctgtgtaaatcgtgcaagggccaagttctagccttgtagatcaaagccgatacgtgttctatcgaacaacaaattgggccgcaacgcgcaatgcgcaacgcagtgtacttgtttattcacgtgtgttaagtcacaccggtctagatatccactcaaaatccatcttagcaatcaatttctgcgtcaggggcagccatccatgtccggatcctgcccggcgccgtgagtggattgccctaacagccggccccgcaccggcgccggcttcccacccaaaaaaatcgaagtataccggtctctcattggcttgttgcctactttaatatgatagatagaggcattatgcaagatcaacacgttctagccaggtgagtcaaagaatcttcaggatttttcaatcaaggtccgctggttgcaatgggaacgagaaactttctacttggcttatatagcgcttggtcctcatctaccggtgttcttgagaatcagaataaaaacatacttccaatcttcttcctttgtgttctagctgcccccacttacttgatggtgcaatatggcgtcagaaacgaaacaatctctcagggctcagatagccgccatcctttcttcaggtacgatcaaccttatccggtatttccggtctgctctaacatatattagacaatgatgacggttttgacgagaggtctcttgcctcaacggagaaaaatccaaagtcaactggtgattaccgaatagttgaactgtcccaagatgaattgcttgtcgagttccaggagaactctccaagaaacccaccgaattgggcctttgtacgcacattcatacatctatatattccgaagaattgactaacaaaaccaatagagcaaaaagttctacaatgccattgtagggatatttatagtcctcaatagcggcatatcatccgcacttcctagcaatgcagtccccgctatcatgcaggacttccacgagtccggagaccagcaaaaagtcttaccaactgccgtctttctcattggctacgtggttgggcctctgctattcagtccattgagtgaaaccattggacggaaacccgttctcctctggtctttcactgtttttgtcctcgctacgcttggatgtgctttagcgccaaattggtcctctcttctcgtctttcgaactatctgtggtctggcaggggctgctcctcagacagttgttggtggtatttatgcggacttgtttttcgatctgcgaacccgtggtcgcgcgatggcgatgtatatgtcggtatgttatgatcaattacgttaacggtagaatatgtgaatagtactaatatgtattctaggcttgcagtttcggtcccattctgggcccgatcatctctggatgctcagtcaaatatggttggagatggccttttaggattgacctgattctgtcgggtattacctggctggctctgctcctcacgtctggtatgattatcacttggaccaacagtggcatcagctaatctcaaattaaaatagaaacttttggcccagcaatcttgaaccgacaatctgccaaattgagaaaacattcgggatccaatcgatacttttcgcgtcaagagctcaatctggactcgagattcactccgatggaaatcatcactcgtcccatcacgatgctcttttttgagcctatcatcacctcaacatccatctatatcgccctcgcatatagcctggtcttcttttactttcaggcctatcctatcatctttgaaggtactgctccatctggatttctcattgatctccaatactaacaattgatcgataggtgtctatgatttcaccgtcgagcaaacttccctcacatatatcccaagtatgtgaatttcttttcataatatccccagacatagctaaccatcacagttggcatcggcgccgcatcctccggcttcgtcgccctctactacgacatgatctacgagaaagccaaaaagctcaacaaagcctggacctccagcgaagagtaccaccgactccccatgtcctgtatcgccgggccctgtctaacaatcagcatgttctggctcgcctggacagcaaagcccaccatgcattgggtagcacccgtgatgtccgggttcgtcttcggattcggattccagacgatcttcatttcgcttcttacctacgtgaccgatgcatacaagatctactctgcgagtgcactggccgcttctgttattgtacggagcattgctggagcgcttttcccgctcgccgccgagccgctctataaatctttcggggtttcatgggctacttccctccttggctttattagtctggcctgcattccgattccttttgctttgatgcgattcggcccttggattcgtgagagaagtcccttctgccagaggctaatcttggaggagaaactcaaggccagtgggtcaaatacacctgtgcaagtatagagaaagaggcattattttcgggttttgcatttttggctttggattctggggaacctggtttattggccgggaaataagtacgaaataatgacttgatacctaatttaataaaagttatgatttacaactagaatacgacgccgaaaataaccgcttttgaggccagaaacggcggtctttccactcgtaaccctaaaacaccactattctgcagcccagcacttgaagtcatccacgagtcctactgcggccttacctattgggttagacaattgcctaaataggaagctactcaatcgcttggcgccaaggcagcacagcacctcaagacctacaagttgaagttgaagttgaatagtccagatcggtggatctatccacctccacttactgttcttggcgtataattagcgtggtatcttcacagattcaaaataatttaatatctaagcaacggcgctctcaagcctcaatccaatatatggtagggtccccgcgtatcactaacagcctagcatccatcgggcatattataaataaggtttatacaatatagaagggaagaattagaagaaatctacatgatacgaaatacaagcttaatactagggactaagactaattagggagatattaggcagatctctgcgcaactagaaaagagggtgaattgctgtagatcatcatcatcatcatcatcttcataatgtgaggagtatcaagtgtggagtccccagaagtcacgaactatggagacctggttgccaagtctatgaaaaatcggtgtgccgatcttgtgatttataggacttatggctgttttcttttgtttggtatgtcgtgcaagttatttacatgtgtgcagatccaccgtataagccattttggaagtttagttgtcaaaacaacccgccccgtgaccgcaatgtctcttcctcacgatacataaaacgctcgcctccgggagacctggtctccagcgtcatcctcctttttgattcaacttttcagtgtttcccacaatggacaccccagaaccttccgttctgctccttcccgacgatcccttcttccatgagctgttcaatcgccatacccaagacccagaagcatgtgttatatatgaccgagcctcggagcgctcggttaccccgtatcactttcttgtcgatattctccagactgtcgacagggttcgccgcattttgagccaaggcgaagaaacaccaagtgccaataacatcttcgtttgcgttctggtgccctacggctatgagtatgctgttactatactcgctctgcgagcacttggactcacagcagtaccggtgtgtaagtaccaaaccccaagtccctaaagttctctcagtacgacctgaagtaggctcttgcaagtctttatttccgaacctgacttgtggtgcgtggaacagcggaagccatcttacctgaggagttcgagtatttcgttcaagtctgcaacgcgacatatttaatcacaattccttcactacaggatcatgcagagtctcttctcagtggtactagcctcgccattctaaccctacagcttcccctctccatcacacagccactgccggtgcttcgaaaacctttacaagtatcagagacctggaatacagaccgtggagccattcttctcttcacttccggaacctcaggccctcctaaaggtgtacttcatacacatcgcagcgtctacatcggagccaaagaatggattgaaacctatggcctgacccgcgatgaccggatactgcttccctggaacagccactggtgcgcaggcttcatgatgctgtctggctgtattctcgctggtacctgtgcggagatctgtccaacagtcttcaatcccgcctggttctgggagagaatcaaggctgcagaggtcacattcctacatctaacacctagccttctcggtccggctattgagtggtacgcaagggaagtaatacgtcagtctccacaggaagtcgaagggtacttggtggggtcaaggcggctaaggactgtcgttattgggtcgacaacggtaccgacgccggttgcagatttttggattgagaaagaggtcaagttcgatctgcactatggttgtaccgagtgctggatgatcgctgcgacagactggagaaaatccgaaggtttcacacctgtgagtatcgtaagcctcttgcttttccttcttgttgaattaacgttgtgtgaaagcgtcatgttggaaagctagtgtctggtgtcgaaacaactctcgcaagtgagagtgaaggcgagatggcgataaagagtcaagggttatttcagaagtaagcagttttacttgccatcataacagtgtgaaacgaatattaacagcattggcatgcttaagatatctgtccgctaatcctcacatcatgaacaacgtattcgacgacaatggttattatctgaccggtgacttcatccgacgtggacacgatgccagtctcttcatcctcggccgtgcttctcaagatggtgagcaatactctcgactttcccgtccaaggtttcctacttttgactacggttcacatattctgttcgcaagctttgtccacactgctgatcatcctgttccatcgtcagtggtgcgcttctctggctggaaggtctttactttggacgttgaagacgcccttctaaatatccctcacatcgctgccgccgtagtccttggtgtcgacgatgacacggtgggccaacgggtctctgctcttattgtgacaaaacctcagcttgagcagtcattgccacagaaagtatcccttgccacactgcgaaggactcttgctctcgagcaacaattaccggtatacaagctgccaacgcttatgcgagtcttagccccaggggaggaaattccgcgaaccaacagcggcaaagtaagcaaagcatcagctcggaagaagttcttcgcgtcagatgatcttgattccgagaaagtggaagcgtgggatctgaataggaaagacgaagatctaccgacaagagcatgggattgggctggaattggagcacagtaattcagagatacacaagcgcaatcacacgatgccagacaaataaatgcaaatttccggaaagaagaaaggaaaaggtctgatactagaatacagacgaggtaatagacagatggattgccctataggctggttccactttacagttaggttcatgaaaaggacaatcggcatcttacgagagggcattgggtgctcgtggtattcatggcattcaattttccaatacttccgagcaggttatgacaacgcttacaaacttgtgccgttctattattgcggcaccctcaaaatgtacgaaatatatcttaataggtttacatcacccccatcatcgatcgaattacagatgcaaacaataaagtcccaaagtatgtctacatgagagttactgccgagaggcacgccatatagatctctttgcctattcaaaatgtttcctgatgcattttacctaactcaattcatggcgcggcaacaataacagacataagtcctaaattccccctctctagcctaggcatacgaccgtcaatatcatccgttgtgaaactatctatgccattccaagtcttggtttgtgttgatcgaaactcagcgagcatcttctcttcttctttgctggtcggttcctcgctgtcagttttgttcttgtatcggtcgaacgctttgacgcagaagtggaatgatttggagaattcggcttgcgtgagtttattcgtggtgtcggctgttccctggatgactagagttgaaagcagagattagagacgaagttttgtatgtgggaaggtgacaaaggggggaacaaagttagattctccatgtgagtccagtagatgggcaggacttactcggcttgaagaaattgaacgctcgatcgaaattgtcttcgccgtattcactcaagaccggttccttttggttacctatttgcttgtacgtactcaagacgacaagcagccagcgtgagtaacctgcttttaccttattgctgtgccattttgcggcaatttcctcttcgcagtcgcctcgaatagctgccgagactgtcactgcggcagaaagcgcgcttgttattgccagatggactccggaggagaaatatgggtcgataaagcatcccgcgtcgccgataatgcgtgcatatgggaatgcataggaagatgagctgtatgaaaaatctgacgccgatttgattcctgtgacaagttcgcctcccgataggaactcgttgagatgcggtgccagcttcagagacgataggtagaagtctctacttgacagaccagaggcagcttttttcttgttcatgatttcttggttcatgacaacgccgacggatgtggtattatcatggagagggatgaaccaagcccagccactctcatctgtaagttaccgtcataatcattaattgcatcggagaactattttctgcctcgtacacagttgtagagtagacataccgattagtgcctcaaagtaaggcgagtcctctcttgctgttccgattccatatttccccgtggatctccagtatccccaacttgcaacatttttgagaccttgattaaatgtgcgattcttcaagtatttggtacttagcaaccctttactgccgcttgcatcaataatgtaatcaaacttcacagcgccgctgacaccctcggatttgagtgtatacgacgcagagacaggacgaccgagagccgaggcaccgctttcgtttccggccgtgccattcgaagtaggcggttgtgcgaactcgattgagttgaccttgaccccgtcaaaagcctttgcacctgactttgccgcatgtcgaaatagtaactcatctgcttcggagcggatgacgttccacgtataatgatttggtccacctgaagcgatgaaatccgtatctgtcgacgagcgtcagaatttggagctaagcaccataattgatgttcgctcatagactcacatccctcataatttgcttggttcagtgtgaaagctgcaccgacctgtataagtcagcttgagaaggcaaccaagaccgtaccgataccaaccgccaacatcttcaagagcttgacgcaatattcacatgatactctggacgtggcgggatatggcagtgctggtactgggacttgccttcttcttaaatccatattgatcgaatgtggagtcgcaatcgataaagcttaagtagtaccgcattgaaggtaacatactctcgccgatatgatatctagtcagtccacgttaagaagtgttgctttcataagtttagtgaaacaagtcggagatttttgaagccaaaggtgacaccggaaaaatataacaggcagtatacagggttataaaggggaatctgtgaaaaatcggttgtcatacctaggatgtacatcggcctccaagaggacagtatcgatgccctctcgagctaaagctgcagcggcataagatcctcctggcccgccaccaacgataaggacagtgcaatgctcaggtattgacattgtaaagcgcaggaattgaagatagaatgtgtggtttgaggagagattgattttgcctcaattgacacggcagtactaggtacggagtacatatcggtaattccgctttaggatgatgacgagtaactaaatcactagttatattgtatgtacaccgacttttcagggacttatgcgggtttcagctgagttattgtccaccggatctcagagcgggtacggcatcgccgatatggacccgctttcgcgacaatagtagtaccaaccaccaagactgcagatacctaccatgtgtatgtaaatctctaacaaaattaagtcactttggtcatatcaactgcgtcatctatcaaggagttgaatcctttaggaatcaggtacgctaactaataggtcctactaatcacaaaaccaaggtcgcttaatccatgaaattcaaaaagtggagaaaaatagatcataactgatcttccaccctgtgcccaccttctgccgaatttagcagggactatacctactagtacgtcatgagtgtggaacatgttttgactacggagtacaaaacaatacaatgtttcctcagtcagcaccagaggctttcatatcacattctcactcttacttatggctgcactgggcatcaacaaaacgcagctaggagagcctttgccccccggagatatacatgtaaggctaaccatcagtccaacgcaactaggatattttctcactgatcaaagggcgtgagcgtgagccttccgctatgggaagatacggttggatggtcaagccgaaacccgcaagttctggcgctgctaaagacaggataccctcgattctttatccatcgtcttatcgacagactcgcggagaagattgttgagaggtttcacacgcacaatgaccacttactttctttgtcttcaggaagggaaacgttgctaggaatgctatttccttgcaagcgaagtgcagatcagtgtgcgcaatttctcagaaaaagtcttcccgagatccagacatgtcggttcacagttctctctttctgcaaagagtcaaattcaccgtctagacttcagacaaaattcggtgtagactggcaaaacttggaactgtatgctgtagtctatcccaattcggcatttagttttgccaagtcgttctggcagcacacgggcttcgggatatcaagtcgctatgcagtactgtgcctcgagaagcaagacctcttgagcttgaaaatcggtcgctgcgatgctgagagtgggtctcacgaattggcaaagggactgggccttccggcagccggggatatagattcgccaaaagcaaggcattggatgctgcacagatagcagagtagtaaaaaccctttatcgaagtttgaaatgaaataatacccaaaaaattgacattggcggaatgacgctattagttatacatcagtctaggaaaaagaattacgataatcacgatctctagcacctggacgaaactgtcgacctgagaagtgatatatataatttattcaacgccgataaatgagtgtatacggaaatttgtatggtgggaatagcttcattttctgaactgagcgctgtcatggtaattcgggtattttaatttctgccagtctattgttgtacttcaggcatttgacctatggccgctctgaaggcaaaaccaacccgatatggtaattcacagtttacatgtaagtacttctgtgcaatatttacaagggcacaagggaggcaatgctaaaagataaaaataaatacaaagccgagacctatcggagatagactgggagctaacttggaagatctccaacaacagcgtctggcgctggcgactttaaaatgatttcgcctctccaaaacaaaagtttgactagaaggtccatcccgaagtatctatatctcttctccaggaccaatcattgcaaggcttagctaggccatagatggccaatgtattgttgtctgctcgacccttgggcttgaagaattccgggtcttcaaatcctacgaaatgactgaatataagatgttaacaacctagtttggactccgcatcatcacctcgcaagatatcatgtaaaacctacattgtttccctttcctcgttccatatcaaatttgtaagccagctatcgactggtaactaggattccgatatccgcagctttactaatcatatatcagtatcattccaatcattccacaacaaacagcctttcaagttagataaagcttactcgtattcctctaggaagactttaaagatttttgcacgtttccggcggctactcccagtacatgctatccccattttcatctccaagggcaattccctcaactttttcaaagataatccatgtgataaagccacctcggacggaaccaagaggagtcctgagtcccttgctcccatgctaagagcttaggggtattaggcgaatttctttccttgagggcttggtatgcctctagctcgggcggcgtaaattgagtggcttcctggggtcagacagggcctatatcgcccttggcagagggaatctgcttcacgatacggaggaaggctgtgggtccattaggaaattgggcatcacgacagacgaatttagtggaggctagggaggggtgggaggggtaggagatagcatcttgccattgttcgacgtgctcgttaatcttttggacgacttcccagttagaagggataggctcgctcagagtcaagatcttgcattctgaatcctggataggatcaggaaaccatattttttgatcagccatgatgggtgtctgctagaacaaatttccatgtaggaactgacttatacatatatatggatgtgacgtagctctgatcctttctataagtaacgttgttcttgttccatgaaccttagaactttgctcatcgtgcggtgatttgaacactgtggcagcgtttcactaaatgtctgcccactaagtgcctgtccaaaggtgtcatcgtgcctgattactggtgaatatcccagaccccagtcgctttcaacatccactttccgaacgaaaacggtctcatcgtacgttgtcaagaacgcgtacttgaggtcccgctcgcgcatctggccagccaattgccctatacgttatataaatgttagccttggaacatatcgagtttgggggattatatgatcacacgaacctaggtaccgcccaagcttcttctcatttccttgttcgaatttgattatggccgcatccagcatattaactttcagacgatcccatggtgttttcgcctctccgacgaccttggtggctctggacgaatcaaggactacaaagtctggaacgcccgtgaagggagttggcctcgcagccttgtaatccgcgaatcgcagattatacccttgggtttggagaacagttgtcactgcctgtctatttctttcgtggaaccttctgcgcacaccaagatcgtccccaaccagaacctgctcggttgcgacagagaatgagccgcctatgacaatggcctcgattaccgccggatcccaagttccgttgtgagaatcgtacttggcgacgacatcttggtaagaactctgccattcgtgaagcgccaggtcgatcttggacaaggagtgcattcaatcaaataactaagatgaagaaagaaagaagaagcaagttgcaaagttgaagaggccagttgatatagctgaccactttgcaaatgttgtaaacaactaaccttcaacagtacacagcaaacgccgggatatggaagtagtgggttccccttgctttggccctttcgagggcagctttcaaggcaggtacagtcactctgctttcagtttaccctcacatgaacttcagattgcaaggttgggtgagaaggtgatgatgatagtgatgtcgacaaagcttcatttttacctgcctagacatgtgagttgaactttggtaatttgcttattcggtctctgttatggtacatcaggtattgaagagaggagaccctgcaacgggggcggcaggggcactgacagctctatttgcgaaacagggtgagagcatagtcgtcacttggagtagggtgccagagaggacctaagagaagatggttgaacgtgtcgttcgtttctatacgaatcacatgccgctgagtcatcctgcactacctaaaatcaggcggaattcaggcatcagccctaaaaaaccagacatagatccctgcccgccatggaccttcgcagccaatgccaaacaatcaaaagataaaaagcaaagatgaagccaaaccccatcggacttagatcaataactcgggcgctaactcgaaacctccccaaccagagcgtctagttgcctggcgtctttaaatcatttcgcctctccactttcaaaaggtccagaatcgcatcttggtttattgattttcttgattttcttggtcttcttcataatactcttgatttatttctcgtttctcgaaatgtactcgcatcttgaagctgaaggcacttcggtaactgtcgctcattgcaaggcgcaaaacttacgagttggttcgtgatcccctccccccccccacttccctcctatccgtgtttactcccgtatatgtatggactaacccgacaacgattaagtcgatcgtgttcttgagcctcaaaccgtcgcacatttccttcaatttgcgttcggtaatgagcccctaccaaatggtgttcaacccaacaccgagcgcttatctgctgaggaagcactcttcatcaaaccaaatcaaaacttccctccagactccgatggcgaacccctcatgaccactgtcatgtcccggattggttcccaccgagatcccagtcgtctgtgcatggtcgggaagaacttgcaattcctcaagtcccgtctatgggagggcgtcatccccctgagcgaccagctatggcaggagaagggcctcgaccgaccaaagcattttgatttcgcgtgtcagtatctaacggccgtgatcgccgtgttccagtatttgaatgaaccaaccgtgcgattatatcttcgcgacacgttcaattacatccacgagcattgggcagcgctcgacactgttctcaacagccgcagagcggagcaaggtaaaaatcgcgttagtgtcgccggtctctggacaatgtacatggcggctcatttcgagatgatgagcgagcgcgctcatagatgggttactgtgcatgtcaatacactacgagcgccattactgcgagctcttctagagcatcggccagtagatgggggagccaaccccctcggcgagcctgacgctatgcaatggaagcttagtgatgcgctgcacatgctagctgaaattaccgccaacgcggattacaccatcatgatccctatgaacggttataaggggtatggggcagctcccccgcgggacggtccgccagcacttcatgcggtgaacctacgggtgagaagtaaagcataccatgagcgtgccaggctgctcactcgggaagagctcgcccgtagtgcagctgcgttcatgggttcatctacagtcccttcggccgcagtatcataccatacgacatcccagtgccagattaaaggccagaatcggttgaggaaagagattcgtggtgcacctattgaacccattccacgcgagccttggattgctgcctgcgcttcgaggattgaatccggaaggagggagcgtaggtacgggttcgctgtgtatcggttgacttacgggcagacggagtctgaatgggcagaatttgtccgcaaagtggaagctcatgtttcggattggggcaaagggcaaacaggaagcggcgcgatcaagaaccatttgaggctgcactggctggatgggaaagagtttggtattccagagggcgatatcgatgcatctagaaagtgagtatgccctttccctctcttttttcccctatcctacactacgaagctaacaagccaaccagacacttcgaaaccatcaaaaattccctcgatgactggtcaaagttacaagtcagggctttcctcgccgttgactccgcttgctttgcctcatacaccaccaattcgtacagtgccgttacatcccggctcattccaggtgactttgccggcttccttctcgccgtcgatccagaattcgactcgaagaatggtagtgaatcagccgacgagtctccaggctacgaaggccatatgcgcatcctcggaagtcttgtgtggagtgatctctattccttgctattatcacagacggcagatctcgaagaatactggccattggcaagcgagcacccgaacatggtgtatgtcggcccgacaatcccatggcagcgatacatctggaagaaacacaacgatatgcgctggaatatccttcgagcggtggtagactatgtaaagcgtaacccgggagtgccaacaacgcaagcaccccgggcgcaaggtacgcttgcagcgatatcccagaccgcagctgcgtctacaactacgccaacaaaccctgctatacccacaccgacagcacacacagagcaggaccctaaccacggagccttccgcacattcatgctcctcgagttccaacgctacttacgccagcagggtcacccgcggcgggcggccatggtcgatgaattgctccgtattcagcctaatgaggagccggatgtaggacggctgagacagttggtgaatgatgagaatgaacgacaggagcagcggagacgagatggtttgggtgaggatgaggaggcttcgggggagtaccggccggactgcccattgcagtgattagggctaaatttatttcttattagttgcgaatagttctcatcatggattgaaagggtttatctcgctggctggtctagggagaaaaccatgcatacaaaggtcaagggtgacatattgaaaaacgaaattgaaattgtttaaaacatgaagcatagccacccgcgctgacatcaaaccgcaggaagatacactaaccccgaggcttgaagcccacaccccagcgccaagcttagtcatagtcccgacgagttcgcttgcgaggacgctcatccgggtccacagccttgtgccaaccaacctggcacatatcctccgtcaagtcccttccacagcaaggatgaaagaacattttcggccaagcttcgcgatattcctcagtgtcatatccatcatatccaagtccataggcaatttcgtccttgtcgcacatttcctcgtcgatgatgtcgagctctgttcatacattagttacatttcccacttgagcgcatgtgtgctaggagaatacacgtaccaacgtgatatctacagcttgtctctgagtttcgggtgacgtcgaacttttccatgcagtagatgcagtttgcaaagcgggatgtcattgggacgctgacttcttgctcagaagtaacgcgcgccgaagtgacggcgacctcagaagtgacgcgggcggtggaagagacagggagaacgggctcggttttcacatcagcctttggtgctagtagccattctgaagcaatcttgcggccttcagggctgttcttgatgatgtccttcaggataccctccagcagtaatttagattgtttctgcatttctactaggaggagtgacaggttctctggttgctcgtcaggtgaaggcatagtgacggttgaatgaagtgcaagtaacgtagggagtaaagaaaggtgaagatctgttcagagactttgtgtctttttgtgggctgcaacgcgcgcgtcctttggttatagaacaaacacgactaatcaaaggggcgcaccgcagcgaacgcagcatctcatgacaaaggcatatatgcgggaatgaactattgtatgtgcttcggtcgcactacatcgtcatttcaagagagagaaagactctgtgccaggctattccaatccgagaagtcgacaaagttaggatcccaaatatcaatatcgaagcctccgtcaagcctcgaatccctaatcccaggtccagtcccatcagcacagacaggacaattcccatggacaattggatgactctgctcatgcgcctggcgaatacgccttgccttattccgcagctgcacaatcatcggccatttaggacccgggtccggccatgagggatcatccgtcaaatcgaactgcatatcgatagcgcgccaagctcgttcgacatgcggaccagtggggtaaacacacagagtccagagaatgaacgtgaagaggtggtactgggtgaaaatcatcatcatccagcggaagccacgcagtaatgcgttgctgttcatctcaaggccaatttccatgccatagcaggcttttgccagcgtatcttggacgaggttgtggtcgagtgaacaagccgccggtccctgtgactgcagctgtttctgtcgaatgcacacttcgatctttgtgaggagcagccggccgaggaggaagccgaagcgctggattgggatgtttgggtcgctgtggcgcaggtatttctcctctattgcgcctttaaactctgcaatgagtagctcgggatcagatgctcctactatgcttcggaccaacgccggccgtctgctgttgatttctaggacgattagagagaatgtcaactcggtccatcggttctctgatacggctgggacgatgttcgtctctgataaactctggtcgtcgacgttcaaaggaagttcggtgtcgccgtagttgctttctgggacggtgagcccgtggtcctctgccactcggctgtcggctgatttgatatgtccccatgttcgtcggcgtagctcgcattccaactgtgggagtttgaaatgtttcccatcccgatggagaccgattgattgtgcggctcggatagttactccatgtaatatccagccagaccggccgctattactaaatctaaagcatgcctagagggcaaagagatgtcagcgatgacaattacaaaaacattgatcaaagacacatgaagcaacattctctcacctgatatatcaccatcgcttgcaacgaggtaagggttggagaatccaaaaactcagcgtgatacaaagataattccatcccatgttggtaccgccgcagattcgcatgcaagacctcattacgagcatcatctgaaagcaagcttgtcgtagcggcaaaacaaatagcaaaaagcaaagcacgtacatcagcacgcacactctcaggctggttaatggccgcaaagatacgcgattgtgccgtcggaacatgaagaaccttcaccaagggctctacacgggcgataaatgtctgccagagcagaaccgcctcccaacgactgggaaatagctcttgggtgttaatctgcgccgagagcgggttcgtgaagatgccatctgccctcaacatcggcagtctatgcggactagttacagcgacgggtgattcaattgcagatttcagctcctgctctttttccagcacccgcgagagaaacggctcgttgatatatcggccgtctttgcctaggaacccctggtgggcggggcattctgccgcagcggggttgctcgatgagggtctgcagtcggatcggctattcggcgtcggtgggattgtactcgggcctgggctttgactgttggtagtcggtcgttcgtcgatcatggatgcgatgaactgttcaagctgttctaaccgtactgcaacatcggttgtgcttttcttcggggcttggcgcttcactcggcttggtcctggatactggcaggttacattctggcgtttgcatttgctgcatggtgagcccttgtcgcatttgatcttgtgctcgtggcagcgtacacaggatcgctctacgttgtaccggcgtgggtggtccatggtgctgtttcacaagctagcgaaatttgaggtcttggtactaggttaaggagaatttctttatcagatcctggcttctgcaatacattgactatcgagcgtcgaactggtgatgtaagttcggtgttcggtcgttcgtgaattaccgacgtccgaaaatgtgggggcgaaagccgcttggctcatgccctatttcccgtacatcagatgattataatgcgaatggacggcctccagatattgtgatggtcaattttattcatcctttgttcaaatattgacctccaggtggaatatcccgccttcaaaggtcggccaagtaacagaacacacgcatcaatacgtgtagacgttcatttgccaagtacaatcccgaagccagatgctaaatacaaagaacgctaataagaaggcttctgggttggtcccagaatccagagccgccaattcccccatgaaacagatattatgaaataagaagatcgcggacactcatgccctttctccttggaatatcagcaggcgcagctggggtctcctccacagacagcgccaatgccgtactcccagggaaattctcactgatcgaatcagcagtccctctccgatcctgagtcagcatgagcaaagctgccgaagcctcatgatcaaccccctgaaactcctgcatcttctcgttcgacgcccatatcgggcccagtgccgggctaggaaggatagatgacgcatcctgcgggatattggctgaggggacttgggtgcgcggagagaaggacggggatgtatcggggaattctgtgggagcagcgcgcaactccggtgatgcagaggtggagtatgaataagcagaagaactatcccttcgcataggcggctcgcctgtttctgcgatgaactcaggggatgttggagaggggggtgcggccggggtatgtgtgaatcctccagtcttcatgtcgcggatacatttctctaggtaattgacatagtcaatgcttgccttgttgggagagttagcatgttgtcaaatttcggaagaaatgtggctgtacctgaagaatggccagcttatgcatttcctgcccggtgcatgctgggatcatgtctttcaacgtcccgaactcctcgttcatcttggaccgtcgtcgccgctcaattagactatgtgcggtcttgcgggcgatcttgcggcctgcagcactagtcgcactgggctgtttccttttagagttcgatgtggggggcattgcgtcttctgaactctgtgaacccttgacattttccctcgtcctggtttttgaaggtgactttggcttcatctggatgatcttgcgagttctggttggtggcggaggcaaatcaaaatcctcgagcgggcgtttgatcgatgtacccgaccgtgcagtgtgacttgaacgacggccagagagttctggggaggttggtgatgccggggcatatgaaggatctgagcgagaagatctccgactggcgttactcaatgcagcaggaggtaatgtgaatgcatccccgtcgggcttatctttgatgatgaagccgcccgacatggctggagttggaagtcgtgacattgtaaaatggagggggggagaaatatgtaaataggtgcagagttgtacagcaaggggtccagactatataaccgtgaacgtcctcgcaggccaggttatagatagtgtcgcgtgcttccaaaggttacgcccacgagctagaaccggcgatgctgattggtggagcggagactcgtgcctcagggagcaacggacatttgctggagtcaactgtggggccatcccgagcttattggtaggtacctggtacttacattagcgtggtggaaaggggctgccccgtggtacctggtacccattacatcaattgaggtagcgcagcacgtgcatcgattggaggacagtctgcgctcgacgattacacggacgcactttatgtctcgtttttggcgacggcaacatttatattcccattggctggcgatggcctgtgtcggtctccatccacggttacatctgaagacttttccgttttgcgtgagacgccctcttctccctagagtacccgcttcctctcgagtcatccacacatggcacgtgcattctctttggagtcgaattgtggatgccggacaagctagctcagggacgatctgtttcggagttcgaattgggaagataacgtgcaataaagcattcatatcacatgatcccatgaccctcatccccttatccaatctatttacagtctcgttctcgtttcaagtaagaggaatagaacgaaagaacaccggttttgaatagggggtggagttcgagatcgctatggggcagttttctcagtccaaaaagtcaaaagcatattccaatctctatagaaatcaacagctatatacgtctatatccaccagatgagttccacttttccaccaaacggacattagttgaagagcctctcaaggatgatattaccaaagtcctcctccccaggagactcatccatccgccagatgcgattaccagcacggccactcagccagagaccatggtcacttgagctctcctcctcgccttcgatgcggtgacggttgcggcgatcggtaacgcacataccgcgagtccactggcccaatgtgtcgactcggatgtcctcaggcgagtttgccgagtgaacccacttcgggtcgtcggatgtcaacgcataccagacgcatacagggtcgtgcagactcagcatggcatcgtcaccaacatgtccagggtgcaggcgctccaaggttctgaaggtgtgccccatgaaggcatcgacccactcagccagcggggagccggcagctagaagaggcgtaatggcctttcggaactgtccgcgtgatagattgtgacgcagggtgatgtcaagtgggaaaagacgcagagtcagttgccggctaagacttttaggatacggtgggagactcccgctcttggtgggtggaactgtcgtgtggggattgggcgaggtgagtgcgaagatacgcgcggctgccactgcatctgcgtaagcgttgaactcgcccattggtgtcaccttttaatatcagccaacgtttctcaatatttcttaaatctggaaaaggcttgacttacatttcctggctcattgatggcaccacccatgacgaccacctctttcacgcggagaaatgcctccgggtcttctgctgcagccaaggccagattagtgagcgggcccactgctaccagagtcactgaatcgggctcattatcacggagcacacggagaatctccttgtatgctggaagcttggacggggtgaatgcgtggtcgtcacttgagcagtcctcgacaggcttaattccctcatccaaagttttagcgaagaggtgctcccatgccttagtagcggtgagatgcgggtgcttttagaaatcagcatggtctacttgtttttaagccatagcaaaggcccggctttgtatgagcttcacataccgttgcgtgaatgcccccaagtccatcggttccgtctgcggggatgtcagtaaacggtagctgaaatggtagagtagaactcacggaaatagtcggcaagcattttttggtcttcaagggggtcctttgcaccgacagccaatataggacggcaagctctcaagctgccgaagccttctggtcggccgttctcgcggcgccactgcatctcccgctcgaggatgtggaacattgacactgcatttcggagacagctggatatcacgtcagaaaatgtatctgcttttcaacccgaaatgattccttacttctccacctcgatgttaccgaatgtcaatgagatgaggagaacctctacctcctccgcggtggcggacagagctagcaaaagggcgaggacatcatcaatgccctgtgctatggttaattctgaaattattgaaatggaatctcaggagcataccggatccgtgtcaatgataatcttctttcccatggtgaatgttgttgaccttcaaatgttggaagatgacggaagtgggagcttatcgttatcagttgttatcgggctgcggggtttcgtctggctatgaacccctcgtatgcaaatcatatactgcacactttcaagtgtatattagagacaccactgttagaatgatatcaagtgattgatcatggtatatattcccaacgaagaaaaatctactagtccaggcttaggactgcaatcccggtgaccgacggtccgcgggcggccaatccccgttatccacccgagcctcatgccccaccagatggcggcaacattctcggtgacaacatagttcctgctcgtcaaaatttctacgtggaacactttttgacggcacttttggagggattaaagtgatcaggagcttgtgattgttactagaacatgtgtcttgagccaatcatccataaccaatgtcgcagaataggtaagaaccaagccgtagcagcatttgcatctcaccctcaaacacgtggatccaacctcggtacctgcaatttctagcgcttctgatagcttgacagcgtggcggatgtcctcttgcctgtgaactagtggaggagcagaaaagcgcctgcatttaggttggaagctattcagacagagaacttgtatcttaaacttcctagctagaacacaaaaattgagggaatgacgtccgggtcttagcttatttgtccgtagactgggtgactaccgacgcgttcatactacgtgcacctacccatcttcggctacggagatttacacccctcatgtattccgtgggacttttcaaatggcaatgagagccacgacttcaggatcgtccacgagaaagcccggtttgatgtttgatgcagacctacatggacctcataacaaatatcgtaatgttatggtccctgtggtaggtgaagcagcatgtgctacgggtccctctgcctgcgctgtctcatggggctacggtgaaatggaggtcagagggatggggaggagagaaggagaaaagaagaaaaattggggaggaggggcgcttttatacccccaacccacgtgccttcctaaagtgcgacaggtccctcgcaccttccctgtgttctggcccgggaaatgagaacacaatcaaaggctcagcactggatagatagtacgtgagattataaagcgtcgcgtcgtttctatgtacagttggtaaaatatttaatgccttttcttgctgcagattgtacaaggtcatcacctcttagcctctaagcttcggcgcctagactaggcacaatttccgacacagtctgcacgtccttgtccccccttccactgaggcaagcaacaacatccttccccggtcatgtacagccccggcaatagcatgagcgctttctcatgcaggaacaataccttccatgcgacctagcaacgaaaaagcctccagtacattggtattattggccgaaacaaacgacattcgtccactttccttccaactggccagctccgggccaacgccagggtaatccagccccacagagatgaattgtgtgtttgaaatctgactactttcgtctttgtggtatataagtgctcacgctgtgaagaacaccaactgagccgcgacctagagttacagaatgttgtccggctagaggcccgcaatcaccagcttcaacaccaacgattgtaaccgatgcatcttataggaaatggtgggacatgcctgccgcgattgaaccgccacccacacaggtgactatggcagtatggagtcgacttccattcattgcgagagcgagtctccgtaccaataccattttgaaacgtccgggttcgggagttgatctggtggatatcacaatagttgaaaatcgaagacttggagacatatttcaataatatactccgtacatagggcttattagtcgcttattttagttcctagtcatgcaattgaaggctgagggcccaaaatggagttgatacttcccaggaagttctgaaaccatgcggcgactaatgctcatcatatcacttctcttctcatacgtagtcatctacgtaagaggagagaagggatcaactaaaggtgatgataaactgtgtccgacggatggaagataatgatctagctactaccatgaagctctctaaatatcttcatacaaacaaagccacaaagatctcatcctccagaatctagaagacacatctctgcaggccagataaagagactgccaagacggcaagttgccttacagctgctacggctgcctgtgagaagagagaaagagagaaatagatgccaaaggagaggtctacaagctgcatagggaaatagtgaaagcccctaaaagcatcaaaatctagaacagaggtagaatgaatactgtcagagaagtaaatgttcgacccctacttctcatagaacaaagaccaagtcgtacagcagaccaccaatcaaggcaccgctaattgatcccagataagaccagcagaggcaagtgacattccgaaacaagtcactgtcgtagcctagtgccaataaggcaagccgggtcccgaggtctcggcttggattgaacacagctccagtttgggaggcgaaggcagcgtgaaggcacacgaccacaaggccaaaaatgattgatctcataccggtgctaggactcttgtcgtcaacggctagaaccatgacagccaggaaaagagctcccatgaactcggttataaacacggtcgcaggcccgatccccactgcatattgaacggccacgaaactggacactatcagattttccgagctcgtagtgaggtaacgctcgatggattggtagcagaggctatacgcagcaatggcagctaagaaagcccctagaaactgagcgcccaagtatctggggacttttcgtttagggaagccgcggtagaaccaaagcacaatagtgatagatgagttgaggtgggcgcgagatatattgccagacaaataagtagcgatcatggtcgcagacccccagatccaactagtgtcggggtgggacttgttggtgacagcggcgatatttgcacaaaagccaattgcgagctgaatgaagacagctgccgcctcgacaacatattccaaaaggattccatggatcacggagcgtgtcctgttgctgatgtggaggtttacaggcatgctcaccgtagcgcctaaccgtctgtctgagtgaacatttagatcttcaggcgcttgttcatgaagctcgccctgtcgtgggcgtttagatttcaccccatccaaaatgagcaaggggcctggagcggtgcccagaacagatgccggactaactggcgcggtgctggaaatcagaagaacgctcttcggtagtactgaattgatggttttattattgccaaatgaggagctcattcttgagctgtggtcgttgttgcaagttgtttttcgagagatgctaggaatgctgatttatgacttcgccatctgtcagctatgctttcctccctgcttcatgttgaacttgacttaccctaaattctggccgtcttgcctggctccgctcatttgttttgtgataacgtgttcgtaagacaaaaacaaagagaaagaaaaaaaaatcgaacccaagctcaaaataattagcaaagaaagtagactcaaaatgtcaaattgcaaggaaacttgtgttcaattctttcggccgaccaatcgaggccaattattcctgcctggccccttgatcaggcctcatcgcctttgacatatagtttccatactatatttggacgtccatggacttttaactactagtaaatatttatcatttgatacttgctgagcccccagagacatcttgattccctcttagaatagccgtgttgtttattgtgaaatataaagccagacagcgaactgtgtgtataccacatttggtcactcaagaatcactgccgatatacggcagatccttgaaaatctcggccgagataatggagacgttttgatcttcgaaaaaaaaacatggcttgtaaaaagatccttatatggaggattagtcgagtttgcataaggttgtataaatcctgggtatagggagggatatatagatggatgggtcagacattggcaccgtagagctgccaagatcataccttgtgaatgaaaagagtgttggacttgtacttaacgcagtatattgggattcgaacctgactattataccctcatttttgctgcctctcatgccgcttctcagcctctgaatcctgatttcgcttggcaagggaacgacattggtgtattttgacaccaaaaggctagcttgcatgatacatgcacatatgtttccttttttcgagtgaaatttgccttacccggccctaagtgcatgcttgagtggcttagctaccagaaaccctgcgaatggtcttaagcccacatgtcatagcctccgcatgatcagcagtcgcagctccaggtgtcgggtgtaaataaagatgtgtcataagccacaccataaattgggtggcgttcctttcgaaaaactttgactactccgtacatgtctcgtgtcgtgacctttttcttgtcgttcgattcgttatgctttccagggacactttacagagtccacaaagctgggatcaagctaatgggaacaacctaagcacaatccggacgaaggcacgagtaagtaaacaaaatcacgctctagacgccgccacgtttcttggcaaacctatcaatcagaatgggcgatattccacctcgtatccccgacacacacacatcttagcgcgaagtgaattcggcgatcgagaacctctaggctactctcgggcaccatcaatgccactacagaacccggctaacatataacaggacgataaatcaaggtaagcctgagtatggcctgaggtgtttacaaaccgccgtacctatatatcgcagatattagcgtccatagcatgccccagcccctttttcacttccccgccggtcatctctctcgtgtttgcatctcagttctttcgtcttcgctgtctcacaatgtcacttcccgttgtctccgtcgcgggaaacgggctgttgtccaaaggcaaacgattccaaatcaaaggtaacttcattaaaaagaatgtgtaattcatgctaacatttccaaactaggtgtcgtttatggccgaagatcctctcgctcgactccgatcgacgttttggccggttcaagagccagtcagtgcgcaatcgatggccctatgataaaggcactaggggcgaatactatcagcgtgggctacatagatgcgacccaaagccacgataaatgcatgcaggttttcgaggacaatggcatatacgttcttgccaacatggcgagtcaaagggattggagccttatgaaatatgacaggaatggatgtcagctcgaacatagtgagtattttcggtcactatatgctcgctacatatgggtactaagattcccaactgcaggccaactccacatggcaaatgaacgttttcaaacaatacgcggctgttctggattcaatggccggatacaacaacctcttggggcttcttgttggagatgaaattattagtggtatgcagcctccaccgctcacggcctcaacaagatttaaatgcataaaataggctatacatcggtcgatctagccccgtatctaaaggctgcagctcgagatatgaaagcttatactgctgctaggcagtatcgtcctataccgattggatacgccacaagcgcagagtatacctatatgcaagcgctaggagaataccttgtgtgtggcggtaacagcgacaatgctgtagatttctattcggtcaatgactaccagtggtgtggcaattcgtccataaaagagtccggctacgacaccttgacatcgaaagtcgaaggcctatcggtacccacattcttttctgaagatggttgcgacgaagtatctccgcggctctttggggaccagcccgcgatttttgggtctaacatgtcaagtatttggagtggtgcaatcatcgatgagtggaggcaggagtaagttgcaacccttgatactcatttgacatgtactaacatcacacaggacgggaaactacgggcttgtctcatataccacttcaggagtcagcacgccaacaactctggccgactacaatgctctgaaaagccagtggtcttctatcagtacaaatactgaacctccgtctacgttatctaccccttcctgtcccgcatcgatcaattcatattggccgatagaccccagcgctgcattgccaacaatagcgggtcttgactttgcgaccatcaaagccgcgggtgctaccgatactacggatagtaccaggacgagtatcagtacgagcaccagtaccagtagcagccatagcacggaatccagcctttcaagtggtgcaaaggccgggattggtattggtgttgcgttgggcgtggtgctctccatcagcttcctcttcctgcttttctggcaccgacgaaagattcgccaaggaagcaaattacctttgatgacacagacccccgaacttgctgcgggaagtttgaatcgtattgctcccccagccgaactagctcacactactccgctgggcgaattagcccaaacaaattcattaaatgaactaccgggttcatctccgagggcccaagagcttgacactggggtggttcacaaggctgacaagcctaaaccaatcataaagtgaattacaacatctggatggtcctaagtattagctatatcgatgcaacctctcaatatcggacaatttatatgctaggagtaggtctattcttgtatgtctaactatgacgccaattgcagaaaatttcggcctctcattcttatgcttttactttctcccttagatgcagtcgacgtttccatttcatgcggctctttctcatcgcccgctgagtcctctctagagggtaattgactggggactcgccgccagtgaaaaccatgaagtcatataagaagccaccagcgaaggcaccacttatggtacccacccacggtccataaaaccaatacggattcaaaaagaggtctctgccgtagccaagtgccagaagggcaaggcgtgggccaaagtcacgagttgggttgaatgcagcgccagtctggtaagcgaaactaatcattaagcaggtgatgacaagcccgataatgagagagttcattccagcaccgggaggggcgttctggtcgtcaccaagagcaagaatagtggtggttaacacgatggttcctaagaactcgttgaaaaaggccgtggcaggcccaatccaggcttcacgctgattggtcacaaagctgttgataattccggtatccgtatttgtgtcgatactgaggtggtgctgaattgactggtaatagagcccgtacgcggtgagtgcagcgcaaaaggccccgacgaactgtgctatacaatactctggcatcttccgtttcgggaagccacgatagaaccacaacatgatagtgatagacgggttgaggtgcgcaccagaaacacctccggagatgtagattcccgacatagtggcaaagccccaggcccaagcggtggtattcgggtttcctgcatcagcaaccgtgacagccaggtcagcgcagaagccaatgaagagctgtataaagacccctagagcttcggctagagcttcgcgatggtgagtcctgatcacagaccaggtagtgtggttgttatgtacctcttcctcaatcaacccttgtacaaggggatgtagatcatcaggtaaagcctcgtgatcaaattcaaggctacctattgtaaaattatcctcgcgcaagtcctgtggaggctcttcgctcggaagctgatgctgatcctccccttcctcgacagaggacagcttggttgcattaggcgaaagccactcggagggttgtctcccgcgcattgacgaagtacgagatacccggctgaatccagcaccgccgcttaggattttgttcataatgttgctctcacgttgcaggcgagcatcctcaacttgggccgaaatctcctgtggatcagcggacttctggatctggcccctctcgatatcattggggtcaatgtcaaggccgagcttctgtgaattctccgctggaagctgagcagaggcatggttttccaacagctccgctttggttggtaccatgcccggccgtaccactcgaggcaacggtttcgccaaactccatactggcttggcgttggcaggttgctcgtaggaagggttcaggtcgatgtaacctggttggacgaacggttcatgggaaagtcgcaactgagtcgtctcgtcagggccagcgacaatgaactccccctgagtcctctctgcgagcgtggtccgcggtacgagactgggtaacacgctccgcctagaggtcactgagctacgccgtcggacatcagtgccgttactagttgcatcgaaggagacccttgtgggtgagacgaatgattcgtccgctcgggaacgggtgcttctcgccggcgaggtaggtgtgtctacagactcggactatggatggaaccaatggtcagtcacctcttgcctcatttgtgtttatctatcgttccttcctcactcgcgttctttctttctctgggttctttttggaattaccttagtccttgcaagtttgtttccttcggcatctcttctttccatattccagtcgatgattcgaggtaatttcttaagtgttaattgaaaaaaaaaaacaaacaatcgaaaagagaccagagaaataaagggtggagaagtatccgtataggctaggttatcaaattattagggcttctatttaccacacattgttactactgtttcaatacacaaatttcaaatgaacacttcgtttaaaggggggccaaactgaacaaatagatcgtgtcatcggacgccagcaccgatccgcaatgatgcgtttgtcggccgaatgaattcttcgagttattttgggctattacggagtacaggccatatacgaaagcctagacttgattccgtatatcaacgaagcatctcatcatttgaatcgtccgatgtcatggaaaattatcctcgcaacgaagattcatgtaacaagcatcattgctatatgtgctttatccgccatgcggtccagtctggaagtcgttggccttcaacgattctcttcctcggggctgcttttgagattcccctcattcttacaacatgccgcaagctcttagtgctacggcgattcctcgctataactaccaccgtacaccctcttaggatccaatttgatcattgttaacttgattaacttgatgacctctttacgaactaaatgtttcacttctatgcaagcattgcttttgtttgaatccttatggcctcgtgatggcctagatccctctgaatatcttttttttatggtctctaaacgacccaggtgatatttcctgcctctttctccgatattcaaaatcgggacctcacttcctcgaataccgcgctcagaacttgtgtgtatcggcactaaaaactgaacaatacctgcttattgtagtcaggcaataaagcttgttcggctaacataaaagcttaatcttgatatagtgtcactacttttcccctcatgcggggtgcggagaatgcttgtcaaaggaaagtcacgcatcggcgagtcttaaacttacacgaagaatatagtagtaaaaaggtttacgttagaggctggcccaatggaatttgtcagcattcggtagcaaaacttgaagcctagtttggagaaatcagtcaaggcagacctcgagatatgtcggccgagatatttgatgtgcctgcgagtggtacgaaaaaccagaatacatgctccaaatcaaacctgctaggagagtgtaaatcaataagtatttgatagttgatagttgatagtcgtctattcgtagaccaccggcaaggatagatagatcatagccttaatcccaaatcaatttcaaagccggtgcttgaactataccccaagtagcaaggacttggttagtgaagaccctttgggtttataaagaatggacgatacaagatttagaataccggggcataatctgagtaggatcaacgccatagatttgctcggtctctgtattcgacggggcatatcaaaggtttaaatattcaatatattggcctgattataagtagcccgcaatatctccctcccacttggagcttcctagcgattgagccttcacgaagaatctcatatttcttgtcaccctcgccatttcccatacctcaaacagttatccctctgtactcatctccattgcttgtcaccgcgatgtcagatatgacgggatcagcaacccagccaaaaggctattggctgtcctcccggcctcggcatcctcacgatgtctagccgtgctgtccagcaagtgcatttgcgcaagattccaccaggttcatattacgcctcgatcgcgaaacggtaccctgtcatgcaaaaatatgagaacaacgaacctgcctactttaccacaccaccaactcaactcatccgcgctctacacgctactctaagccagatcacagctcgacctattgctgagcgcattgccattcacggcaggcttctgacaagattaaggctgctgtcactcggcctggtctgaaacaggttgctacccgccccgagtgccaggctcacgggctgactgcaatgtacgtacctcctggtttgaccccgcctgacgtgctccctggcatccttaggcgcggggtggtatttgcggctggcttgcataagtaaatagccaatcaggataatcgatttggtcatatgggtgtcagtgttttggatacagatcgcggcgatattgagaagggtttggtagctctgacgctttgactgaggcgagacagatcaaagggatgtagggatgaaaaggtggctgtgtactggcacagtcaaggtctcagtagtagttactatccatccatcgtctgtaactcgcttactgggatcgaggaaactaccacaaacctcgacgaggcggtaacagaagcctttgtaattcctagctccaaatcgtgattctatgcatactcaagtcgatgacctacagcgctctccgttcatttctcatgcagtccgattattgtccgtcacggcggcaacggcatctatctgtttgctgagggtaaataaccctgaagaccaacggggctgtatttctcccacatcacctggcggtcacttccgcgtgctacattagttacttagtgttttgaatgatagaaccttctccctctgcgacgataaaggtttcgacctccttttttttagtttgctgagaggttgtttgtgactcgacgccttagggcgggccggccccgccgcctgggcgcgtcgcggagtctttgtcgcgtcggtgagccaaccacttacaacatacccacaccgcaaacgcccctggccagatattactgaaacctcggtgaccgctcatatcatgggcttagtgggagacttcaggaggatcaaaggacacagaagagtaagaaactaatctgatatgtcgaagacttactccgtacatattgatgaccggcgaaccaatcccacgcctccttttcaaagtgctgcatactgcaggtcttagactcgttagccaatgccaatgcatgacttgaccaccaattggaccgggtggtccgttatgtccggtgcataactcctttccgcctcgtggtagggctcctgtaaggggtaaaagaacatttgagagatcccctgccggattgatgaatccaatattcaaataaataaatgctccacgctaggaagatataaatcagagcgtcgaaagcggagaataaagagacaggcggagacgtggcctgttcactctcggtgtcttcatatattggagcttattagtatgttccccaggtacggagtacgttgaatacaacgattgaaacatatgcagtcaatgctcaaatcagcgtacggtataagcatcacattgaaatgtttattcgccaagttcctagacaagtagaaaatcgaggagacttgaacagttagaccaaagatcaagatgctctagaaagacgccttggaggtatataataaatgcagtgaagtccaaagccaagggctcggtaatttaccattaccgtcacagtaccgtggtggatctgccacggttgccctttcctctactcctctgctcttcgcctttccacctttcctcccttctccatcttctactctctttaacttgccttgtttatcctgcgcaccgactgttcctattcctcccattcacgaattcatccccccagcgcattcccccaggcgctctcacggtcaattgaccgactggaatctcctcttgaggaccttcctactggatacatcaagcttctgtagctgagtacaattggctcggctttcggtgcgcaactcaatttcgaagtgcgcgtgcgcaattgtcctaccctctcatcccccgcaactttcttcatccgtcatctttcgatcaacacccatcctccgcctatctcggttttaatccaacagtaagttccatgcaaccatcatggcagcgttgatggtactgacttacgagtgcacagctccatgactatgaacccctatattagctgggcgatcttgctcgtcgtggcaggtagcctgggctggtactacaccaatggcacaacccccaaggccaacgtgattcgagctgccgtcgagaagaccgaggccactgtagcgcccaagaagtcaaagcgcaagtctaagcctgctcccgagccggctgccgccaaaaagtctgaggtgaagaccgtcatgtcgtcccccaccaccgaggatgacaaaccggacgaggaaatcgaccgcaaggagatggcccgtcgcatggctggcctgaagaccaacgctcctgctcagcccgctcccgccaagcccgctcccacgaagagtcagaagaagaacaagaagaaggctgcacacgccagcgacacccgtgcctcctcgaccactggcgctgaggctgacgacgatctatcttccgccgggtcgccccaggtgaacgccactgttccctcggccggatatgtttccgacatgctggaggcccccgcccccggtgcatctgtgctccgcgttactggcaatgtggagaaccagcctaagaagcagaaggttcagaccttcaaggaggtggagaccaagaagcagcgccagcagcgtctcaagaacgaggcccgcaagcaacaagttttggaggctgaagctgaacgcaagaagctgcttgagaagcagttgcacactgctcgcgagtcggagcgccgcgaggctgcccgatcatctacacccgctgccaacgcctggcagacccaggaaaacattgctccagtgaagaccaacggggtcaatggcggatcccgccccgctcccgccgctcctgccacttccgtctctcagggccttctggatacttttgagtcccctgctgctcctactaagtgggcacagaaccttccctctgaggaggagcagctgcgcctcttgggagctgccaaaggtgatgacgaatggaccactgtctctaagaagcagcccaagaagaagggcgccaagtccgacgagagtgtcagcgagaccagtgcctcggagaaccactccacccttgttgcccctgcccctattgagccgcgcgtgacggtgaccccaacctacctccccgacatcttgcgctcgcgcgagaagggccacccgctggactctgactgggctgcgtgagctgtttccttcatgaagtatttctctccgttctctcttcatcttgagctgtatttattacccttacttcgtctttgttttctcttttttggcgttctgggggtgtcacatcattcaagcaccctccctcccctcaacaatggggcctgggaggttgcgcaacgcattaggagcggaattggtagattcccttgcaagttgtgcaagaggaagaactgcactgcggcaacaaaagcagaattgcgggaatggatctgacgctgtgtttgtgcaagttcttttttttctttgttagtctagctggcaaaaatctgtattgcaatgaaatcataaccaatgcttgatctaaaacaaaataaggcgcaagaatgtagagcttcctccgatattcactatagagtccctgtgtcgtcactattcccaaaacggtttagcggccagttccggttatcgtggcctgaaggtgctttgtatacaactccttggtatttgctcctgtcttgaacttcttcttccccaacctgtgaggactcaactccaatttcttcttcttctcaatctctttttgtattattcttccgccatggcccaaattcgtggcactgcgggctataatctcggccaccagaacccgtttggcgggcccggcagcgcagatgccgccagcgatcctagtccactggacgcaatccgcgagcagacaagcaagatcgaggactggttggataccttggccgatccagtgaagccgtatgtttcaatcctactctttgttttggtcctatttctctacccgcgtcgtggttcaagtcgcgaaagagctcaaaacaagggattcaaggcatgcactgacaccctgttctttcgctctctagctaccttcccgctatcggccgattcctcatcgtagtgaccttcatcgaagactcgctgcgcatcctcacacaatggagcgatcagctcctttatctccgtgatttccggaagagtaagataatgcccctgcatcccggtccctgatcggcacgacttagggtccagggtcctgcataacatcgtctaacgcgcttttttcttctgctggctttagttccgtggggaatcacgcacacgttccttcttgttaatgtcatcgccatggccgtttgttcgttcctggtcatcgcccgcaaacgcaccgaggtcgccgtcgcgggattgctcgccgttgttgtcacacagggtcttggatacggtctcatcttcgacttgaacttcttccttcgcaatctgagtgttgtcggtggtctgcttatggtcctgtccgattcgtgggtgcgcaagaagttcgtccccgccggtctgccccagcttgatgaaaaggaccgcaagatgtatgtccagttcgctggtcgtgtgttgctgatcttcctcttcattgggtttgttttctctggcgattggagcttctggcgcattctggtcagcttgttcggttttgtcgcttgcgtcatggtcattgttggcttcaaggccaagtggagcgccatcattcttgtggtcttgctgagtctgttcaatgtgtttgtgaacaacttctggactgtacgtttactgggcgattgattctatctttggttactgatggtttcgtctagctgcatgcccaccacccgcaaaaggacttcgccaagtacgacttcttccagatcttgtcgattgtgtatgttgtctctccccaataggagatatgtccaacgctaacaatttctacagtggtggtttagtcctactcgtcaacatgggccccggccaattgagcatggacgagaaaaagaaggtctactagagcagaaggaggtcgaaacgcgattcccttctctctatatatctcccggcatctgcatcctagcaaacacaacaaagagggatagaaatcaacaaggggcggcctggctggtgctccgcgggctccgagcattcagatacgggcccttttcgacccttgactggtttgcagaggctatgcatggctgggttgggcgttgtttgcatttgggatgattttgaaacgccgaggagatccaacgatctactcgttattgcgtcttttcttttttgggttgttctaccccgcgcttttgtgtcctggtctcttctttcattgagatcgaaaacaatgtcctttgcatatgatgtttttgatgtgcatttgaattgcatctatcacgaagacaaactgaatggaaaatctaacgctgattgcgacgcatatctgtattgtcctttgcttaagactcaataatagtagcaatggctacgtctaatagaaggcatctagtaatattgagccgacttctgtccctctttatatatgtctctcttgttgaccattgtcaaaacccctatatgttcctgtgcagaattttacttgctgaggaagtcggactctgatgtatcattctgtatataaaatctacaatctagacatatgttgctcatatttggttttataatacggatatttggacggcccagatctaaatctagatgaggggcagcagcttctagagatcttgtataagaaccaccgagtttcaagaaacattcaactatatttacactaacatagtattcatctcgccgattaaatgtctaaaaagagaaaaacattcattgctggtcaaacgctatgtactggtggtaaccctaacagagagggagtgattatggtacaaggaagagataacatctaggaactaaagcaaagctgaaaagatagaaaagagaattccgcagggccacaaagtgagggagataaaggagagacaaggaaaaggattgtgaaatgataggaaggagtgctgtcatgatgaactcgcccgttctcttacggctgtaatgaaacaacgctgtgagggaacagcagaggaacttttgcaggatggaggtgcatttcgcttttatataccggaccagccaggtacattcctatgagggatctgagtccgacagcgagaggatgagtgtttgctccggtgttttctccgaggcagatttggcaaacacggaaggagtcttggaaaacgaggtgaaataaaggacaaacaaggacaaaaaatgactaaaaagcagatgctcactgggcttgatatgcttcaaacgccgtattgctaaacccggagaagctgatgcgaggggagatatggcgttgctgagggatgagtgttgtggaattcgcgttcgactttagatgtccatgctccaacgccaggggcggataggctgcaattgacccagaccaacatcatcgcggctgtcgtcgttgatctctaggtgtagcatgtggaccttcttgttgtcccggtggactgtggagagagtcttcgagatatgtgggcggtaggtcttatcttcatctgtggctttcgattgagggcgagatgcaggggtgtcagggtatttccattcgaagcttggagagtcatccgagagggtcgtggagaacatagagtcagttcgagagtgtaaatctgcgtctggaacattggagtcgatacggagtcgagtcaacgacggtcgacgttgttgatggtgctgggtggtgtcatcgacagctccgtcgccagactcgctgttgattcgttcagtttcgttctccctggccacattcttgggaggccgggatatgttaccacaggcactaccacgagtcggcgaagtgacgtcggctttaccagccatcactcgggcactcggtggtggctggagcatccatctggtctcggcacggctacacggtccactaacaatgggcgggtggaggtcgttcacaggcggcacgcgggcgatgtagtacttggaggtttcgttcgggtctgcacgaccgcgtccagagaatccaatggacgatccacgcacttcctgttgtccccaaagaggctcatcttcgcgttggtagcgcattgatttccacttctcgccgagtggatgcatcaggccagcactcttgtctttcttgagttgcgagctctggtcggtagtgcaactgtccgttcgttgaacagggcggtgaccaccccgacgagctggaggaccagggccgagggcgatttcttcccgccagcctacattggtactgaacggggttggttgtgggaatggacgaggttggtcggtgattaattcgttgttgcgtcgctccttctccttttcccgctgcacccgggtagcatcatttctacgtttccgacgatcgaggttctcggcgcagggggtgcaagtggcataatagaagaccgcggactgagcgccccgatagagccacatggctggcgcggggggggtgagtggggaagatcggtttattggggcttgttttgtggctaagagtgcaccgtcgtggacgacgggctatcagcccgtgaaatctgttgggattgacgcggtattcgctcgttgtgttgtagtgatactatcggacacatgaagggctgagcggataggggggaaactgcggaaaggggcgggatggcaaggtaaacgtatgaattggagatcgcccagcgatctgtaggctcaagagagggtaaaaaatagttgggagagagggggagagagaagagagaagtgagatgaaatgacaattaggggaggtttctgagggggcgtcgttagtttctgcctggggtgtttcgctttgagttgatattttttttcactgtttgcggcctaacctgggtattccacgttcatatatgtcaagatatatagacaattacaattcaccgacttcttctaaatcttcaaacaagttacaccctgcagtatacacctcacattgtcacaaatagcctcctaacttgctgcgccaaggccgacagggggctgaggaccgaggcgtatggggtactagataattatagagatcgaattgaactacggagtaccctgtccggagcatacaatctataacatcactgcctagttctttatctctctctctctttgtgatccttttctttcttgctacgaggatacatatgtactccgttgactccacaccgtatgagaccttggcatcttcccgcgtggagtcgagcaggaatgtggctgcaaacggtagattactcctttttgtagagaatgcagaagattggaatggtaattcagtagattcacattcttctggaccgtaggggcctacatctcatacttgaaagaggccaagtagtcgcatccccgtaaattcattgtctgtgccatcgtctgtgctctgggccccccgcaaaagtcattcgaggggcaacaatgccgagttgatggtctcatatgtagccattgcatcattgcacatcagagtcggatatgtcaatgaaatcacaacccgtgaaagatcgctgtaggttcgcagtaaataatcaatagatcgacattcaacagcgtatccatcgtggtaggccaagaagcccgcgatggcgaattcaatagtaaagagccacacgcaacgctggcaaactccaagattcttcagcttgctgaatcgttgtatcgcatgcaaatggtttccttaaaacgcccgaaaactgatggaaaatagcaccgtgtatgttgtaagcccccgctcatgcattcttcgtgcctcggattacttcgcctttcaccttagaccagtcgatctcgctgtccattttctcgtctatttcaccacacaccacgacattgtcaccgcggatcaggtacagcccatgctcaatctctgtggagggctcctcgtcgtcgggagtgcggatgatgcgttcaacggtattggccaggacaagattggtcgcttgatcggttgacaggagatcgccgatgagtgtgcggccgtcaacggtgaggatcaggactttttctgttcgatcgagagtggtcagcagttaacttctataggaaatggcgtatgtaggcactctagctaatgtagaactcactattgacgtaaaaatggagagacatgttggatgggagagcggttcaaaaaggtgaaagggtatctcaagtttgcggttgatcgggtctaggtagatgcaccgctgaaagatgtatctcgagcccgctgatgttcctgtcgctgggcctggagtagctctcttgctttgcgtgggctggaggaggttcgtgggatcttgtcacttcgcgcaaaaagtgctcgtcgaggtgaagagccggattgatcgcggttggttgtagcgcgacaattttgacttgccgaggatcctcaagctcgcggacggaagattcaatctgcaggagctccgtttaaagctcgaggccaatcaaatgggagttgatgataatggcgcagagcgggtctgtactgttggtcgaatcgcaagtaagattgccagaatcctagatgataacaataaaattctagaaacacgagagtcgatgacctcgactgatagcaaagagattggtggcagcacgtgtcttggggcttcatggttgttttccaggattgtcgattgacatccccgattcaatcacgtgcagaagcttgtaggagagtggataccacaacattttatactgttttatgagagatcaacgcgtttaaggtggaaaacatgggctttgttgtacaactgagctacacaatgagctacatagatgactctagtgtaaaaggatttatgtatagcaattcactatgtgtgcacgatatcgcccgcaatttcccatgcactccaatcagcctcgcaaagcactcagatccaaaggaacactgctgccccgtccagcgcggtatcggcggtctccaccgataaagtgccgtggtttggggagtagcccttcagtttggaatttgaatcgcgggtcttctattcggactgggccatgtccttgtgttgaaggactttgtgcgcctactgcaggcgatccaccattggaaagtgtatacgcgctagggtccagcgatgcaaatggttcgtgggagacagggcgagaggaagcaggggatggtcgggatggcggctcgcttggcggagctgcaggaagtgaaattggaggcggtgggggtggagcacctggggcagctgatgggggtggtgggggaggtgccgagggcgaagaatgtcccagggcagaacgtgcagcctgcgcagcaatcgagggggctattgaggggggaggaggaggtgtcgatctagaagcagccggcgggggaggaggtgcccgacccacgggggctgatgggggtggtggcggaggtccggacggttttctcgatgtaggcggtggtggaagcttgcctggtgctggaggtggaggaggcgcgcgtggtggcggcgcttcaggggcccttgtagctggcgctgaaactgtagatgatgatcgtgaagcaggccttgggggaggcttcttcaagccggcaatcaaaggattgatcggtggcgcaggcggtacatcggtcgatgatggacggggaggcggtctgactccaggaggccggggagctgttggaggcttgggggctggcgcagcaggtggtcgatgtgccccttcggaatcggagatatatggcgagtcacgattggcacctgtatcgatacctccacgactccgtagcttgggcattccaccagcaaataaacctcctaattgaggtggcgttggactggatgcaccatctgtccccgaaaccccttcgctgttacttcgtaatcgattcgcggctggaccggatggtacgggcggtgcaagcccgcttggaggcggccttgcgccaggaacaggtggcgcacctgcgactgggggagctgctgagacgcctcctgaactgccgattacaggggctgatcgatcattggtaacagccttcctcagcctggcgcccttgtgaatatcagaaagaagtgcgccctatctataggttagctgccaagttccttaagcgacaagctgcttgcggtaatgaaactgaagcacccagtttacctacccgatctttagcctgtcctttgggaggcctgcctgggaggccacctggagggggcggcgggggaggaccgcccaaacctcccggcggcggcggtggcggcgggggaggaggaggtggcatagttggggatcagataatgagagtatcagatagacagtttcatataatttagaaaataatcaggtcaggaagatgtgttcctggaataggaggaacatgacagagaagtaagaagacgtcagggtgcgagtacggggaagtggacagcgtcggggcgaagtctccgcctggactctcccatcgaaaaaaatacggctgcctcacaacgtcactcatcaccacagccatgaaaagagttgttctaacagccaataagggctcccagccacagggctcgatctgtcaattatgtcagttctcgacttcaacgccccgtcgtggcctccctatcgcgcgtctccccaccgctcgcgcaagtcgagctgcgacctccaatctccgtttacaaccctcgaatcgaaccgataggttgatactcggctctccttcgcttattttccgtcgatatgcttccgctgcgaccactaggataagcccagaggatgcaatcaaagagattgcgcaggatgcattggccgtacatcaatcaaacgcggcggcctccaacgaggtggtgatagaattgctacaaagatgccagctggtcgccaaatcccttgtcttacaggaacgggatcaaatcgagggatcatcaaagggtgagggcaacgcggtctcttctttactagacctggaggagaagcaacctgcgccgaagaacaaaggcaaaccacactccttacaacatccggacccccgactggcaaattcagtcgcaaaaatcgccgttgacctcttgaaggacgagaaggtcttcatttcgcccgaagctctggcctcctgcaccgagaccctgactctactgcgacgggccgagcacttccccgagctcttccacctttatgcctacaagcctgtcccagaagagggtagctctccggtgaagttgctgaaagccaatcccaagagtgtcaacagcgccgttccggcggagctggctaacatggctcttggggttgccattgcacagaaaaatctctcgctcgtgctggccatcatcgataatactttctgcgcccccgccttccaccgtgcgaagatcttcaagaaagccggcgtcccgctggctggccttgcggctgccccggctgcttgctatgctctcgcatcgtgggccgcaacattccagaacacaatggatccgagcgtagcgactgggattgcgtttgccgcttcactggcttacgttggcggtgcatcctccatgggctttttggctattaccacggctaacgatcagatggaacgtgtggtctggattcctggtatcccactgcggcaacggtggttgcgcgaggaagagcgcgctgctatggatagagttgctgttgcatggggttttaaggatccttatatgagaggcgaggaagttggtgaagagtgggaaagtcttcgtgagttcattggcatgcggggcatggttctggataagaccgaattgatggaaggcatggagtaacttgattccctgcatgtgtatcataagagtctcttgtttcacacataatgagcaatgtaacatacaaacctaagctttatctacagctacattatactggtaagattacgatagaatagcagattgagaccgatcatgagcttcatatttttttaaagtcgtgagactatgagataaacccaatactcaggcccaaactagaaaacaccggcgcagttaagcgacagataatctagtagacacggtggggaggggacatggaagccttgatgacaagactgccaacgttctgccagcccttcttgaggagggagacgaggtagttgatggcgagcatgaggttggcaacgagggcctccttctccatctcgacgttgccgatggcaacaccgaggcacagaaccttcttgagctggaacttgatggtggagcggacgtcggtgaccttgacggccatgtcctcagcggcggagacgggggtagggaacttgccggccttggacagaccgggaccgaggagacggggaatctgcttgatcagaccctcggaagcaaggaaagcatcgtacttgcgagcaagcttcttgatgagcttcttgttcttgttgagcttcttgagatcgtcaacggacatggcatcgataccgtggtgcttggcacggtcaagatcgtgctgatcaccaagaacactatagattccgtccgttagcttctatgttctttcgaggtgtatacatccttcgccgccgcgcatcgtgggatgtgaaagattgccccgcgggacgagttgtcgatgggaaacgcaccagatggccatgttggggcggggaacgctgggcagcttgatggtgccagagaaacgcttatcacgctggggatcgtagttcttcaggccgatctgaagctcaacggtctcgttgaagttacgcttcttctcattgagagagtagttgagaaggttctcgacattctggcgcactccggctgtaatgagaagagcagttagtggcaagatcaagtagagaatatcatggggtaagtcgtaccgactgtgatcttggacatgattgctacagtcttccaaaagaagttaaaattctgttggtatggctctgcgctgaatgcttgagaaaagaaattgtcgagggccgtgaatttctccgcttgtgggtgtggacttgcgctagtctagattaggattagcggtgccctagatttttgtttgctgactcatcaaacagcctgaggcatgaatacgaaccgatttccccaacctcggcaagacctacgctgtatgacggccacggatacttcactcaatgcaattccactcgctcatactccgtacaaataatcgcattagcaagcgtcgactcggcttgtataaaaaataatatcgagaatcctaatccctcttcgtattgctcggtcaggtcaacattgctgctgtttcaagtaaccgccggccttgcctagtacgcttttcctgttactgcatttggcaaaacttccaatattagaccaggtgaggactagttagtgcaaataatggaacatcgatcttgcttgtcaataatatgtcgggcacacacgaaacgaaagcatacgaagaggtctggacggatactaaattggtgattccctcggagaattgggattaaagtgataaattgcccagataagaagcacgcaaacttatatttcaaggttcaaagctatatacgattcatgtaggtatgtccattgtattttatagaacgtacggcatactcaggtagaagcatcgaccgggtcgccccgccacatagccgacccgcttatatcgatagatcattactttattatttatcctatttcattgttcaagaaagtgtctcgttaattgatatttctttgtgcagcgatagcagtaagggcttggatcggatatgtttataaataccttgttttcgcatatccccgaagatcgatctagatcaaccacaagcacgagtccgtattaagcaggcacaaagtagtccagctgagtagatacatcattttaacaggcggtggtatctgatattaattatcaaatacgtatacaccacctaaaaagatcttcaagactcctcgtcatcggcatcttctgaccacaaacaatatatatcgaatagtccagatgaccgaccaacacacaagcttttgctaagcagacgggtatataatacagcaacccacaaaacgagcaaataggatgctagatcatctattttaggacagttctcaactggtgaaacgaacttgacatggtctgcgggggctgcatctgatcgcagcgcttaaacgtgaccggcggcagtgtcagcctcaggactggtcacccaacccccctttggcgtcgagggctattgccttgtgtttcgatttaatttagacattcccagtgagattagaatacttaaacttgactttctgctaattccttttgtgatatactccaggtttacattctatggtcaaggttgtttacacctgggcatgacttggcttgacttaatccgagataccccctcctgacttggcagctgatcttttgaccattggctattgattttttttttggcttatttacagaccaccttgtttggctttatcatgtcttctacaacagattcgcgcgagtcaactgcaccgcaggattactactcaagtcttgacgatgagggcccgcttgtggaaaagttcaagaacatcgacgataagacgcagttttaccttgctatgcgccgtctacaggaccctcttactcagaatttcgtgctcgatttcgggaacgatgaggcatggtgtgcgtctgatctggacactaacgaattgaaacggttgctgagcaagccggtaagtctttttcgaagattagacttgagtctatccaacagtaaagggctgacatgatacagagagacaagtgctttggtacacggtggatgtaagaatgaagtcaaatgtagacgagtatatactgacattgtgatcacagcaatatatgggcaccagaggagcagaaggaaagcataagggtatgttcaatttcattcgcatatgagcagtattgactgaccatggattcctaggcgattaccaaatactatggagtgtcagaacggctacaggggatgatgtgcacagagccagtggatcctgcacccaaaactacacctgtaccaaacaaaaggacttcgaaatcgcctattattgagccgtcgttcgagcacgaagtggatgacccggagaatgcactcaagcatctcgccgatccagataaatcgcgcgagtcggcgtcattctcgaatctcaccttcgcacaagtcacgaatcaaatctggcacttctcttctgtggatcatggtcctcgatgtaagtacatcgcaccaaacccgagtgagcataaacattaagaatctgttagacacatgtatcggctataatacgttgtatgtgattcccacactatcacaaccgaatggccaagatctcccggatggaaaacggctttggacctggctgatccagtgcgatgatggtgagcatcccatttttcggatctcgagtgcagccgctaacttgtttgcaggcacaataatttcaatccaagagaaccccttcccgagacggaaggcagtgccaatagatgaagccaagccagtcctcgacatcgtgcgcaggaacatccgctttattttcgctggcgtttcgagacagcactttgccatgtccgagagcgagtcgctgattaccatccgagtgcgacattttagtgacctcggaccggatcaggccaatatcaagcagaaggatggaccgagtttgctcttctactatatcttcgatgactgggtgtcaagttatggacttatcgcaaagcgagaacacaaatatggggttgctttggagaaattggtcagtagtgtcgggaaagcacggttgtgttaatgtgttccgatggctaaccccgcgcagagaggccaaatgctcgatcgtccggttgtagatttggtaaacgaattgcactggctgggccgacgactcgcagttctcaaacgattgtaccagagctatgagcttatcatgcggcgactcttgcaacggcaacgcatgctccgcgacgaagcgcgttcgtctcaaccagccccggtttcgtatggagccacctttagcgacatggagtatgtagatatgcgccagtcgagtgtcgtgagcgatttcactttccatgatacaactgataaatcggtcggtgtgcagctgagctcgacggccgtggcgcgtttcgaacggttggttgatcggatcaatctgtactgtttgagcgagattgagaactgtctgaatgagaaagagtctttgacgttcttggtgagtatcttcccgtgctttattccgagaactctgctgacgtggcctagaatttcaacttaattgcgctcaaagactcgcaggctgttgaaaagctcactcggatcactattctgctggctaaggcgaccattttgttcctgccggtcagcttgatgagtgcgtacttttcgacggaactcgttggagtcaagaatgggtacaccaaggcggattactgggtcagtttcgtggtgatcttccttgtaaccatcttgctcttgaccgttttcggttacgccagcgatactgtcgaaggcaggacgatctaccggtccatgatacgaacattcttccgacggtctcgccagagaatgtcgcgacgatcagaagaataagagaaattggctatgacggcatgaagaaccgagagatggggtggaagaaattacgcaggcacgataagtgtgggaaggtcgggcctatcactcggcctatcagacacggtgggaccttttcctgagggtcttagcccgggggaactccctttggtatttcatttacggggccaacacggtgtcctctttctaggaaaatataccttcccgaatctatagctagttataggcagaactattagagtcataccatatatagtcgaccgaatctaaatcataagttgccttcttcatatatctctcagcctcattttctcgacgttgcgtgctctccagcaaaacgggtgacaaagactacgcccaccgccgtcggtctgcgtatttccacgtattcaaaacaaaaacgaaacaaatttcacccttctgacttctcttcgataattcccctgaacttgcatctcttgagactccttaaacaacatttatactcttttctgccggtaagtggttgatccggttttgactggctcgtgcccagacttaccccccttcccccctggatctctgaccgacaagtccacaacacgttttccaacccctccgcttctcccctttcaactacatccctcgatatatctctgacctatccactcctcccaggatccgagggttttctcgctaccgacaatatgggtattactttctcgcggttgttcgaccgactatggggccgcaaggagatgcgcatcctgatggtcggtcttgacgccgctggtaagaccaccatcctgtacaagctcaagctcggtgaaatcgtcaccaccattcccacgattggttagtccgcccctcgacccatctatcggcgacaccgtgatgcgctcttcgcaatttataagccgtataagagacattcaaaacccccccggaaactgatgcctagtgcaggattcaacgtcgagacggtcgaatacaagaacattcagttcaccgtgtgggatgtcggtggtcaagataagattcgtcctctgtggcgccactacttccagaacacccagggtattatcttcgtggttgacagcaacgatcgcgatcgtgttgttgaggcccgtgaggagttgcagcgcatgttgaacgaggacgagctccgtgatgctctcctcctggtgttcgccaacaagcaggatttgccggtaaggacttggattgttggaggatgtttgctagatgaaatggcatgctgacctcccccgcttttttttctagaacgctatgagccctgccgagatcacgcagcagcttggtcttcagagccttactcgccgtgcttgggtaagtgtcgtcccccgatttctatgttgtttacaaattcactaaccgtcctagttcatccaatccacctgcgccaccactggtgacggtctgtacgagggtctggagtggctcgctgatgcgctccggaaaaccaaccgcgattaaggtctataatgcgaattcgaatcggacgtgtagctgggtgaaggagaataccgatatctgcgaatgatggattgatgatgacgatggcggggagttctttggccatacatgacattgatctctgcaaggaaaggttctgcaactggttcgctacttcttttgatgttctctcttcaaacggctctttttcctctacgctatgctattagcctcatttgtttttcttctctccggcgtcgccactccaaaattacttctctgccttggaaccccagagatctgtataagttctcaaattgtaaaatctcagaatctcgattgggcaaggagagtgtgagagaacacaagaggaacaaatgagcaaatttcgaagtttcatctgctttctgctttcttatcttggcttgaggcctgtagggctcagtcggactgagtaaatttcagtccgggctcaggtaccatcacgtgatggattcacaagggtctgacagtcattccaatgttgtttttgttcaattcttatgctaaagtatggtaaagaagtttctactttgcttatgtctagccatggactttaagattatgtgggacaaaatatacatcagtaggatccacatagttagggcttatgtggacatatggagtccccggatctataggacaaaatgcgtataactgcgtgaacgaatgcttcaaacatacacagctctgactgccaaagacattttacaaacgctcagtgtctgcaggttcctggtatgaccagagtttcgtgaacaactctttctcttcgtcatctttagccaatccgatgaagatgtctttgaatttccggctattcttctgggctgtatcgtagtctttgggcagtaccatgccatccaccggaagcacagatccatctcgaaatattttcagtaacttcccgacaccatttatattctcctcttccttggaatgaagctcgacatcctgattggtgaaactgatcggacatggtacagccgggacgagtttttcccactgagcgaagagcgacgtgagtgactcgcgaacaaaaaaaagatcgcaattttcccacactcccgtgaccagccaaactggtttccggatgatggggatctttttattttgaaggacagaccagtaacgaggcgatagtctatacaccttggctaggtagtacttgtgaaggatctgactctctagatcgtcatcgatcttgcgttgttcttctgcacttaggctgccaaagtcttccggtctttcgggcacgacccagccttcttgaagaggcccacggtgggcacacatccttgggacatcggcatggtagaacaacggtgcaacacacgctgattgccaatccacgatacatgtaatttggagggtctttggatcgacgaagatgttatctagattaagatcggggtgcattagaacgtttttgacgccgcgtcgttggatgctgtttcgttggtagattgaagaataagatagggagcaactttcatatatttggtcaaaagagcaagaccgtcctcgggatgttcctggcttttgagtgaccgataatagttcatccgaggaattgcatgtgacttcatatacgcaatctcgttgcgccccaatgaacgagtgtagtcactgggatgcttccctatattagaaagacgaccagaagcttttcaccagcctgtcgattctcttgacttacatggaccacgatccaaatccatgccactccgtaccccgttccacaattcgccagtagtgagaggtcccatggcaaaaatatcaagggtgctggtcgtagcagactgaatgttggcttctttaggttcctcgcctagggagcgaagatcatccttgaagtaaatacagccgtgcatatcaaaagtcacaccagtcagagtgttctgaatgtcaatcatctggatgatcaattggagctttggatctcgagaccattgattccaaacagagcctagacaaacaccgggcgctttttcttcaataatatactcggccccgacatgattatttgcgtcaaaggacgatgctaggactcgaggaacagggagcttcaagacgtcggaaagctatgtaaattgaattgtaagattggatatagcaaaaatgaccggcagaattacttactaacttgcgtgtagcgatctcggaagtaattgtgaaccgagcagccccggtgttaggatttgggagctttgccaaaacttcgcaaccgttgtccattgtcaggataaatgccttgttgtgtaggccttctgcacattttgtgactttggtacctaatgaaactagcgtattattacattgcaaagtcctaaggacagcaacgcacaagattgagctccctcgcaaacactaatggcaacttgaacaagttgctgtaggtcaaactccacataacgtttagagagttctttttcttagttgaaccttgaaattcgagccaagttaaaattcattttcctaaagaaaatgaactgcgtagcttacagccaccggtgtctggtgtatcggtgcagatcttcctcagaaatcctctggtctggaggagagataatcaacaattcagggcagatcacagtgtattttgaatataattaccttgaccatgctgtgtctcagcatagagctcaggagagcagtgtcgtctgcctagacgagacgtggtgaataagctcatattctgagctcgggagcaaggaaaggcacgtgctcgtacacgtgtattacttttccaattgatccaacgaattctggaaataattcgcattgtcatcttgtagaataaccccggcgagtgtcatatcaaggtgcgatggggacttggaagggggttaaatttgagcacgtgctgacatgcctagtgagcctcatacaaatccgatataccaaaccttggaaggttacggagactcacaaccttattttgactgtgcgaggtagttctttccatttatttcgcgtgccttccaaatttcgattcttactttctatcgcatgcagatctattcaatcaatggaattacccacttcgtcacggccaaggaaccacgtttgctcgtgctttatgcggagtcgagacctgttttaccgtggccaaaaccttcttacagacacttcggctgtcctacgtagctggtaagtgtttgtgcaacatgccaagctgcagagtctatgatcgaacagtcgcgcatacgtggccagcgagcaaattatcctcgaagcccaccggattccgacctacaaagtttgccgaagctaacgagtatagtggcgtctatcgatcacacgaagctagtgcgggtctacatacatttcctcatccctctagttccatacaaaatgcagtctaagctctacgagctcaagtgggacctaaaaaagccataacaaatgggactatcgatcccatcgtcttagcttcaacgtatacgtatactttcgtggacattcctccgtttactggcaacaagctatgcaaagaactatgtcctagctcatgtgaagaagtgagacggggttgatgagtgctgtggtgcaactaagtctagggctggtcatgggttgaccatggaggtttaagtattttgcaggatgttacgtatcaaagagctctctagcactggagtatagagctatggatatgttcaatttcatcaactacacaagaattgtcgccggcagcctcgtgtcttttcggtagtcttcacagatattgtttttttcccccccaaatccagctaggtaagtatatgcgtacaagacccataaaaaggcccattaaatacacctagaaaccaaaatagatttaaaagaaacaagacgcaatctccagggctgatccgctcgggcttggaccagtccattttgaggacacaactgcgtaatccctcatttcttggacagcgccaacagtcttggcacttttaactgcagaaattaccgacttgggcccttggggctgcttatcttctgtttcgcatttgaatatcgtctagttctaggcagtttcgtctgttttttattgttttactgtcttcacctccttttagctcttttatctcttaagagcgactccggaccaagccccattgcctggccgacgatcaacaacaacacagctcatcgcgtgcctctccctccgtccaacaaccacccctgatttgggcaatatcgaacagatttttctatcgttacacttgttagatagatgggctggtaatcgtgtgattttggacaattaactacctcactcattcaatgttgacatattgtctggcatcatgactgttcaggcgaggagggcctccgcagcttacaaggccccatcaccatataatccacgagatacagacatcgaaaagcaacccgccaccgggcgccacacctatcaccaccaccaaagcgatgaccccgatactgaagacgagttgctggacgataacaatgtcgcggaatcctacccgccgcccatcgtagctggcggcagtcttcgccgcccccaagctagcgttggctttcgcgtaccccagcggatcatgcgctggctctgcttcgctcttttcgccgccctcgtcgtcttcatcctcaccctcttccgctttaccatctcctcctccgtctcacaagtcgccgtcgacctgcccacggtcggcgccccgaagccgccactatgggagacctttccgttcctcactcgctacgagggtggtatctcttccttggttccgcgctctgaaaatatacccgagtaccctggcgatggctccgaggacctgggtttgcggacggacagcgacgagcagaaggcgcaggcgcaggagcaggatgccaacaaggtgaccaagagggatatgagcccgaacatgttgagtaatgtgttcaatccttatcctgactaccaatcgccggaatacatagaaaaacatggcgagaagcgcgagtgcttcctcaatgcggaaaacacgctacggattccgtctatccaaagctaccccggaattccaaagggctttccagatccagcgataggttcgagcgagatactgggtattcgggacgacatgtgctttgatcgatttggccgattgggtccatacgggttaggatacggggctaagaaaggcggcatcggcgcgggcatggagggccaccgtgagggtgccgaccgcgtgtgggaggatgtcccgccggtcgatttccgacaagtggattgggctgctgcgcaacaccgttgtcacgcggctaatcgccatcgctttaacgagctgccggagccgcgtctcaaccgctttgtttctatgcctgtaggtattcctaaggtgaacatcccgccgcctgtggaagacagccgcaatgaaccgcccaaggttggacctgagcgtctgccgcgcactgcagtggttatccgcacatggcacgactttcactataccccagaggacattatgtacatgcgctccatcatctcagagctctcgcttctgtctggtggcgagtatactgttcacttcttggttcatgtcaaggatacccttttgcagatctggtccgatgacgagacatatcagcgtgtgcttgatgaagcactaccagaggagttccgcggcatggggactctctggtccgagccacagatggccctgatgtatgccggattggaggagaccatgactcgcggtctgccaatccacggtgtataccgcagcacgtacatgcctatgcagtacttcgctttccagcatcctgagtacgactacttctggaattgggagatggatgcgcgttacacgggccattggtaccacctcttcgacaaggtcggcgaatgggcgaaaaagcagccacgaaagggtctgtgggaacgcaatgctcgcttctatgttccgtccgtccacggctcctgggaagacttccggcagatggtccgcgtgcagaccgaaagcggtacaaactccgccaacaacatgtggagcgccgtcaagggcaacacgcggagtgcaatgcaccaacagggcgacaagtccatctggggccctgagcgccccgatgaacaggatatcttcgaggttgagggtgagggtatcccgcctacgagcatggataaggaccagtaccaatggggcgtgggtgaggaggctgacctagtcgtgttcaatccgctctacgaccccgagggcacgacctggctgctgcgcgacgacgtgacaggctacgacaaggagaatggcatgccaccgcggcgcaccgcaatcatcaccgcgtcgcgaatctcccgcaaactgctcatcaccatgcaccgcgaatgcagcctcaagcgccacagcatgttctcggaaatgtggcccgccaccaccgcacttcaccacggcttcaaggctgtcttcgtcccgcacgccgtctacgtcgaccgccgctggccgacccgctacctggattcagtgttcaatgccggtcgcaacggagcttccggcggtgctcgtacgtctatcttcggcgatcgcgaacacaacttccgtgggacgacctggttctactcagcgggcttctcgccgaacatctggcgccgctggcttggccttcgcgtcgacaatgacggcggtgaacagcaagagctggctggcgagggccgcatgtgtctgcctcctatgctgctacaccccgtcaaagaagtcaatattatcattgacgacggagagaaagtagaggaccagtgaagaaggagggagtatatatttctctcagaattggcttcgattcgtttcttgggtgtccctcacaccctctcttcctgccatctccaggattcatgcacgctttggggtagatgcttatttgtcttgcattggttctcataattactgtataatgacccttcattccccggtggcataacgtccccacgttttggattcccgtttctcaatttcggtgcgaaaaaggcgttcgcatggcctggatggccgggctatggctcacgatgcattctggattttcccttggtgcttgaccacttggtctagtcattagaggtgctagattgcgttctgcatcgggagaattttgtttttgcttgacctggactggatatttcagaaggacgagacggacttcttccagcgagggctattttggttacgaattgtttcttgcacataatttatatttttggttttatgatttattcgagtagaacatgggatgtcgctagagatacaaatatgcctatatacaatgcaattataacttcaacccactacttctactggtcaaccctggtcggcacaaagcaaatattacactcataaaccccatcctcgtcaaccccatatgtaagacaagtccgacacacccgatgcccacactcggtaaccaaaatctccaccctctccccgtcctcaacacaagcatgacagaaatgcgtcggaaacctaagcggcggattctgaaccatacgccgctcaatctcggaagcgagttcctttcccttctcgacgcgcgcacggaggagcgcggcttttgtgcgcagtttgttcatggtagatttgttgaaggggttatcggcttcttcttctgacgtcgtcgggcttgtgttgggcttgtgcagggtcggaaatggttcggggacgatcaggggtcggaagcgttcgcatatgggtctgtctcgcatgcaatttcgttcgaggtgatagcggcggaggatttgccggttaaggaggattgtatagaatactatgaacgtttgccaggcgcgccattcggagactgggtccaaagggagggggaggagggttgagactttgctgggggttgttgtcttgaggcgttgggtttgggtttgagttgaagacatgttgaagttgattataatatgtttttttttccttctgtagttgagagggggtttatagcgaatagatcgaagtattggcttcacaagcctagcttgggctcttttgcagagagatgggagaatgtagaaaattcgccggccacgagacccggcatatcaatagagattatatcgatctatccaccccagaaccaaatatgcctctatctacatagcactgattggctatatcatgactcctgtgtcttctcgtccaagcaattctagattcggtgcataaagcattatgtccaggtataccatggatgtagctgagcgcgaaacgcggattctttttccctggcctgcgatatcggcagacattagcgtagacaaccggttccttgaggtgtaaaacaggttgagtctagatgctgtcaggttcaatatttgccattgaagtggcggaaaaatatcaattgggaagtgacgattgcattggtctagaactatcgagtctctgggtttgttgatattgaatttcttctatgttgtcgtgtttcgcattattttgatttctttcatacataccaaagggataagagagcaaagagaagagaaaaagggataattctaaaggtagatgctgtctcaacatgaaatatttccaactctgttccagagtctccagttttttttatccactctgcgatctcgatgcttttcttcagcatcacctccatctgcccgctcttgtatgcagcacaggtccatcctcagtctcttgtgtaggaatgggatgttaactccctattctctgctcttcttacacccttatcctccaaattgcccacctcgacgcattcccaggatatgaccgaaacccccctgaaatgaaaggtatacaaatactcgaccccagaacccgaatcgatactcttggcggatatcacgtattccccaggaatagacaccccctctttcctctgccgacagagcggcgtcaactcccagacccggacaagtcgatccgctgacagcctatccgctaaggccgaccatatctcaattcgggaagtggcaatatcaaatcccacttcagccaagcgcatgatgaaccgcacattgtcttgcccagagtgttcccctccagtcgggccatgtgtctctacacagacatactccctatcatatgccgggctagtcggataccgcgggtaaaagcctagagtcccaaaagatgcttcatgtccattagcacctgatgtatgagaggacttccaagtcccatgcagagcacgaaaaatagccgaggctgcagccttctgtgcggcctcatgaccagggagaagagcgtcgcgcaaagcacctagtgtcctatccgcctcgctctctgtacctggagttggggtattgccataaagatacctcgcaggaacaacaggtccagaccggccgtcgcctgcttctagtgccgagcgactaatctctagatccttcgcgaacgactccatcaatccgacgtagtcgcccatggggaactgaccacgggctagatccgggtgtgccgatctgagacgccgaaggttttgcttctggtcgtctgttttgcagagcgcaccgttattctcctcactccataatttcccaaggaacctcgcttgcatctccatcacgccccagtacgggccgcggtagaatccgacgaatccggcatcgggaatctccgagcggacggtgcctcccttgtcgagaatcaacggtgagaaggggtccgtcttgcagtattcaagcgtcatcaacacttcatccggtagcaatgatagggacttgtatggcgtgaacccggtggccatgactatcaccgccacattgtctatcgtcttggtcttcccgtcgggcccttcatactgaactgaggtttgcttaatatctggatcagaaatcacagcagtcacccggcccatcgatgtctgaatcgctccacacctgacgaattcggcgtaatcattacctatggcgacccatggtggctgggttctggattcctcggcaccatgtggtgcatccatgtgcgcgtatttctcataatcactgccgagcaaggtgtggaagtaactgtttgttttgactgctttttcttctggaatgggtccgaggatgtagtctattggacccgggggtcggcggcctaggtcgtacatggccaagtctaacggtaagaaagatggactcccatcgggagactcgtgtgggagatacgtcggcaaagcccagaacggtcttgaatgtatatgatgcacttttgtctcttgtgtatgtgggactctgtttgtggaaggtgtagatgaagattgccggagagccacagcagatgcagcttcgacgcctgacatgctgccgccgatgacgacgatctggcccttcacatcgttggattcattagagagcgcctgctctcgttcataatggagcgaagagctatggatgattcggccttggaattgatctaggcctggtatgtttggaatatactgctgggcaaagtatccagaggcgatgacaatcacgtcgaaatcttcagaagatatcccatccagtaacccaggagtttcctccgcgctatatagtcagcatccagctcgagtacagcgacacgcgagtgagcaccaacatacctttcctgaacccactgaacattccacttcgggtcacctccacccccaaccctccgtatagttcttatcactctacaccctagcctcaggacatgagctggaacataccgctctgcataacaggccaggtattctccaacctgtctcgcctgaggaaaaatcggaatatccgcgtcggggattaccgactcccaggacagatctgaaaaagcgactgagaagcggctgaggttggtccgcatgcgagggtctagtgtaaccggggggccattggtctgattgggagagtgatggtgacttgaccacagacccccgacttcgttctggctctcgaagatgattggagagaatgtcccgctcggaaaattatgaagaagggttttggctgtgactaggcctgaggggccggcgcctgtggaatgcgatgttagtgtaaggtcgggtataccatctgggtatagagttgtatccgcggggtctcgactctagagtctggactcaccgatgattgctactttcttgggtgacatcttggggttggatgggaggtttgcaatgtacaagatccctatgttttgtttgtctgatgtgcttttcaatataacgttggaagtaacaactcggcagactcgagctgttgtcgctagacttaccccgcttatatccacttgggaaacagctcgggtttctttcttttctatataaaccgtggacatgtaatcatttgcatgtccggagtaatcattttgaatacgatgtcgtacattcgaagttgtataacatcgacaattagtaacaagtctacgatagtcatctagttaagcacaattcgaaccagcttcatatcgccacacccacaacgggcgtaattataaccccttaattcaaatatgtatacatcgatgtaccttgtacatctctttcaagttccaatacgccaaaaaggcggagcttaaggctctcggcgtgcataccagcaaatcatgacgttaacgccaagcataaccccagcaaccagggttcgtgaattccctcatggagcaaccacgaccggacaatttcctggcccccgaaaaaaaatgcaacttgagcgccaggactgaatttcccatattggacgcgtgctgtagggtggcgtaagagttcgacaaaaggtcgagaaaaagactagcggaactctatcgtattcgcatcgctcgtgctcatgctggtgctcgttccatatcggtttgtgtgcagatggtactttcagactcaggagactcgccgtagccattcagtaacttggatattgggcgagtgtagattgggcctgtatgcctcgtcgcattcttgttcggtgaccaaggtatcgacatttctctcggtcaaggggactctgtggtggttctttgttcggaggagttccttttccgcgaaggaggatggcgccagctttgagagtgtgtctcggaggcgtttgatgccactggggaaggatcgcggtatttgaggtggaccaaatgggttgtcggatctccatgggtagtcggaagtcacggactggacgtgcttcttaggagacagtgttctcgtcattgcttgcgacgttgggaggttgagggagttcgctgtaaatgatttgagttggaaggagtagggattttggtcaagtacgatataagcaattattatttctggccttgtagctaattccgcgggacccgcggtgttgccccgtcgtagtatcatcggatccctggttgtctatgctggtcattcatcacgcagtagtagttcgctagtcgccatacttcccccacaaatgtgtcgtgggtcatgatcggcggatgcagatcaacttaggctgatcaactatgtactattggggctcaccggttagtatttgacacacaaacaatggctgtacaataaatatctggcgaacgtactacgtcatggagatgccgatcaaggcatagttttgtagactgtcccagggaagagtcgcagagatggtgttttctgacgaataggaattgaataaatgaatacataaaccgtctagggtcataaggcgtggaaagtgtaatataaatctagcatataccagtatactacttcatgttcaattctcaatcgctacttaataagtaaatcggaaactgggatgatcatccccagcattctccagctcctccctgggccaatggtaacggtgatctctcttgccctgctcacgcagccgattttcacggtatacataaccaaagaacacaatacacgccacacctccgatccatatcatccctagactaacaccgaacccagttctataagtcggagcctcagagtcaaagaagacattgctagcgaccagaccgccacagttaccaaagccgatctgcatggccgaggcgatagattgcttgtaatgcccagccatgttgttactcacccagcccaacaagatcggctgcgccatgtatcctccaccggtgatcgcgtatatggcgaagtatcgggcagcgactggcaccaactcctgacagatgagaataacgtacccaattgtggcgatgacgcatcccaacatggtaaatgcgaatcgatggcggagtcggtcgctgatgaaggctgtagctagtgcgattgctgtcgcgacgaggtagatgggaatactcatcacttgagctcggacagatgtccagccgagctgtcggaggatggtcggggcgaagaatgatgttgcatagcctgtattgacgattccaaagtacataatagcactgaaagcgactaattgttagtggaagctatgtaatatcggcactcaagcttacccaagatagatcttcacatctgagaatgtccgcttgatggccggcttgtcgaagcgattcatttgcgcttcgccgcggtcgtccgataggcgccgaagtagcaaagcacgctcttcctcattcaggaaagtagatgtttcgggccaatcgacgatgaggaatttggcagcaattccagtgaatactgtaagtaaaccttcaatgatgaagatccagcgccagccgctgtatcctccgacaccatccatctgagctattccataggcaagaagctaggagaatgatttagtgtagaatcaactcatcatgtaggcaatacatactccactgactgcgccagccagaatgcttgcgctgaagaaaatgttgaatcgccattgcaactcgtggcgcttgtaatacatagcaatcaagtagatgcagcctgcataatattagtacttgtgttatcaagtcagggatcaactatccaacctggcatcaatccagcctcaaacaagcccagcaagaatcgacatgcaacgaggccaccaaagctctttaccacaccttgacatgtggtaacaacacctgatatcatcgaggtcagcccatgttccttgatcctatatcggttcaaacataccccaacagagcatgatcccgctcaaccaccaagatggcggtacctttttcaagaagagattgctaggaacttcgaaaaggatatagggaatgaagaagataaagagggcgatgttgtaatcatgtccctccatccccagatctttctcgagaccctgaatccgcgcgttaccgatattgatccgatcaagaaaggcaagtaggaataaaaacatgagaatgggaacgacatggatatcgagcttccgtagcagtcgtttctctgcggctggatctatgtccggcacggaaaccgcggacttgacatcctcgaccgtctcctggtatattttcttctgctccattttggatatttcagatgaacctcaaattgacacaagcggccaccaggataatccaaaatatggtagagcaatagccccttttatatacgtttagtgccagtcgatataccatcgcatctggggaaatccggggaatccggggccccgcactacaagcccgcaccgcgatgttgtgttgattcattccgcgttctttgatcgctgtcggtatttgattccgcccctaggaatgccaagaatccccggcttggtgtgtagcttcgtgtctggcatgttgcccgccgggtacctggtctatagtcactgagtatgtatttgatcgcaggtttgttgatggctaggcacttgcgaacctattcacttggtcagagggttatagctcgaggtcttgatattgtatatatccaaagccatagtccaggagcggggtatacatttgcaatttacgatttggggtggcgttgaaatataaagttcgtggccagtgaagccgaccctatttatgatgacggaatggaaccgcatcatgccgcatagagggctcttgaatacgatcgctcgatagttggaataaccgatatcaatatagccgaatatcgaattcaaatctaagctaaggtggctagaattgggccttatcatgctgaccctctcacgagccgacattcttgcgaatagttggctccaatgagaacacctgcttatccgctgcaacatccttgtagactatgtcccagcgttcttggagctcccgaggtgtttcccatgcgttttcagggtctcgcagccagagtcgcaacaaatgacgcctaatgtagccatgccgttagcacatccatacagcaataatgtatacgaacgaaaagaacatactctttaccaggctcatctttaaatccattccgcgcatggaaaatgctaagattgttcacatactgcacatcacctttctggaaatccagagtggcactgtgctttgccgccaagaagtgcaaagcgtcgagcgcctcagcttgcgcctcggtgataggtgggatatccttcgatcgaggctgagccaggaatccggtgaagtatcgtcttgcgtattgaatcagaaccctctcgggggtagtggcagtggctggttggtggtatagaagtgggcggaggctgtagggcctggctgggttattgaaactaaacagtgttaattttaagtctgcttccttggcgcttggtaatccttacccatctactggccaatcctgggacagagtgtgaatgagatcaggtctttccttggccaggatgttatacacattccagctgctagcaagatagctttctcctccctctgcggcgcggttcagacagaggagtgagattatatcgccagcatcagtgtggaaaacttgcttgtcagacgtgtttgacggggctccgataagcttcttgtcggtcgtgctagtgaggtctttgatatgggatatcacgggcgagttgccatccgccagtcgagcttcttgctgccgtcctcgaatattgccgatgtgggaagatacaccggcatatatgatgatattgtcttcccgggaataattatcgatgcgcaacccccggagaacgacgaatcctcgaccggtgtggatctccttcgaaaggtctcgaaggacaggccgcagggtaggtagaggaaaattcgactgattaatatgccccgaggaaagaccaagagctgttaagtcagcaatgggaacttaatactgtggtcaaaagattacttacatttgaagctcttcaaagcagcgtcgagttcatctagctgatcatcgctcaactgataaacccaatcatcccgcttctcgacgtcttttccttcccagactagtgacgataccagcttctgtgggaagcctgcaggcaaagtggactgcaggtcctcagtctcctttcgccgacgagtacgctccttgtacttttcataatcaggatgatactgaatatcgggctgggtggccacagtgatagtctgaacagcggacatatttgttatgcagaagagaaataacagatgtcagatgaaagatccttggacaggtttatctttggtcacccggagtgtggtcacgacatcaaccccgcaaagcgcgagataagtcgaacaacacaggagaaccttacagctaattaccaacttcaatcgcgtcaatattcgcaattatccggaagtgacatccatttcagattcttattttgacctttctgtctgtcaatatataatcatagggagaaatgggttcgatttgaaacattaatttgaaatataatgatccagtgtggtgtaaaggtcggattatgattatcccaccttaaccaatgtatacaggatgtctgatagttgctcatgtcttttcaaagtcgttgaatcaatatagagaccatcaagcttgtattgcggaagggattgcgggccggaggcttgggacttgaggaattaagtgaaggataaagcggtgctattaggcctcttgcatctagtagaattatgttaaatcaggaagctgataatatatatttctcgccttctcccattagatcgttcattcaccaaaaaccgtggtagtagatcataatcatctctaattttatttgctcaaagatatatattaagcagaaaggtaacagataaaacgagattcataaatcgcgctcggcgcgcttgcattagagactgctcgtaacattttcaaatatcaacacctaattgatcgcatatagataaattaacctagttccgagtatgctcaacagcaacagcaccaggctgcttgctttcttcgtggctcatctgaacccccttctggtgtgccatcacctcctctccccgagcaacatggttagcaccgccaaatagaatatcaatctcctcaaggggaacctgcttggtctccggaataaggaaccaaacgaagacggcaagtaggaagttaataccggcaaacatgtagaaggcatagaagccctcgttgtcgaggaaaagagggaagaattgctgcacgatggcgttggcgatgttctgagtctgcgatgccatacctacggcctgtgcgcgaacgttcattgagaaaatctcagacgtccagatccatactgttgcgccccaagatggtttgtctgaaaatgatgttagtgaagttccgtttgcagggaaatggtaagtagaaggaacttacagaataagatgaacaagaacagaaggaacacaatcgatataccgacaggctccgacttggctccattggcaagttgtggtgtttctgtttcgacggcggagacaatgatcatgcagagacccatgccgataccaccgacaatcaagaggaactttctcccgaatcgatcaacaatccagacggcgttcagggtgaagaaaattccaaaggtggcgttcagagcgttgatcagagcaatctgactgtcgctggtaaacaccttctggtagatcttggtagagtatgagttgagtgagccttgtccggtgatctgttggccggcattgagaaccagagctagacccatgcgcttgcggagagacttgtctttccagagagccgagtaattgctagagatagcttccttctcgtattcgatagcctcacgaatctccagcagctcttgctcgacttcctcctcggtatcacgaactcttcggagagcttcacgggccttctcgatgttgtttcctctccggatatacctagtaatggtcagaattgctcgggccaatcgaaatcgccaacatggacttaccaacgagggctaccggggatagtcggcaggagggcaaggatcaaaataggaaccaaaagctggaaaataacaaccaatctccagtcccactcacccagctggggaacatttttagtgcaggcaaagttgatccagaagcagatgaacgatccaacagagtagaacatctgccagaaagtcatgatcttaccacggatctctggcggagccaattcaccaatgtagatagggcccgcagctgcaaaaacaagctgtcagtccccgtcattgaaaccacaggatcaacaagacttactcaatgcgataccctggccaataccaataatgcatctaccggcaaggaagcaggcaagatcgtggtgaggagcgaaggtttgcataaaggtggcaataatgactaaaatacagccaatgcccattccaagtttgcggcccaggaagtctgcacacgggcctcccaggaagaaaccaccaaagatagcaccgaccgtgtatgctgtattaattgagccgattgtcgacgcatttgggtggttcatccaagcgagccagttcttggaaccctggactgagttgaatacagatgcatcgtagccgtagagtaccatacatgatgctgcaacgcaagagatgtacctaggaaattagattagggtatgttcagcggattatatgactgtgcaccaaccaattgtacgctctcttacgggtcattgaaaaagtcattctgatgatggcctgtctgttctaacagtgtgatttgagatatagaaccacactgcaatatattttcaacttctgtgggcagtgacagacgaacaactgttgcccttagtgtgagagaacagttaaggaggagctacattccagggggtacctgagtgggcgaaggctgcagctatataagaaagtacaagaagcgatcagggcgcgttccgggggtagaaaatacaaccccagtccatgtgagcaggtggatcagaccatccccagaatcaacaaaccccggatgtgccaagagtgcttttggcatttggataacggggagccctcggctccaggatcgctgagtggtgggtatctggggtcaatggcacaagggcaacgcatataccacgcctagtcgatttctcattggctttgaaaattctcacatgtgcgggccggacctggggtaatggacatctggggttcgaggatattttcaagcttttgttccggcgagatgaagttggggagttttccacgaataggcgggctggacgacagtggcttaggagaaagtcaagtccaccaataggggaaatggtaaaggacagtatatttaaggcaaaaagggcgctaaaataaacaagtaggagatacggggtacataataagcgactgcccaggtagttagacttctggggttcttttaggctggagatagggctgactttatccttataaagagacgtggagccggggcaaccttttcttatgttctgctgataatacattctttggcatctctatttacagagtttcactagaaatagattgaataggctaaaaatgtgaatccaagctaacaaggctctaataataggctaaagacactctggcaaaggaagcatgacttgagtaatccgtagaaagattcatagaagagctttggggaagctctacggagtaatatatgttgaattgcttttctgtaagaacagaccaatctgccttctatggataatcacctaggagctgcgcgcgcatatctgcatgtataaaacctgatcgaactatcaatgtaacatatcaagatatttccatttcctcctttcacttctagaattaagtatcagtccgaaacattcgcaattcctctcactttcgcctgtaagtatacatatcacgtgatctcgtgatttttcacaacgcgatccgcgacagcgaaggtcccactggtataacagtctcaagctttatttttctttgaacatattttcttttgtctgaatttgctgtgacctacctagatatatgatcccggcactctacctaatccagccagttctgttattttgactacaagcaatgccaccccgcaaatcgaagaaaaagcagacgcgacttgcctttgctgcttcagccgcttcgccttcggcggatgcgagtccggagagtagccgatatgcaacacttacatatgatcacccaagcttgggcacgtaccgtcctccaaagtctctcaacagcgagtcggggacttcgcccgcgagcaaacgtccgaagctccccgccaagacgaggtctaaggataaacccacaagtacggtgatgatctatatcctcaatgctaccagaaaactaagatgcaaaagacgaactgttcgtagagaaatcgagccatgaatccttagacgaaacaatcatccccgcctcccagaagaggaagcaagtcgcgccacccgacaacctcgacccggtaaatctcgatgacgcccaagaatcgaagaattcccgctcgcgaaaatcacaacaatccttggaatgctcaaagacagatagcgagagcacaaatggttctgattcggaggagctttcccggccgcgccgatcactcaagcgaagggccccaagctcaccgattgactccagcgactcagatgagccagtagcctcttcggcccccaaccggcgtaggtctacccgaggtggccattcttcaagctcgcctgttatactcagcggtgattattcaaacgagtcagtggctccttcgaccgccaagaggcgcagggtagcaaggccagccgtagtttcagaacgtgatgaagttgactcggacgaaccattggcctcctcaccagtgaagaggctccgacgtggaaaagcgaaagaaagtccccaagccccccacacccccaggcacatctcgcagcaggccagacttgatattgcagaggatttggaggaccttcaggattcgggtaggaaccaattagcgtacgaggctcgtttatttatgctgatgcaatcatgcgtagttgttaagaaaagtcgaactcgcggccggaatgtcgaatctgcccgagacaaaagaatgaagcacctcgaagctttgcgccgcagacgggctggtatgaaagatgaggaagaggaacaagaagatgaggaagacgacgatgatgaagaagaatccgatccagatgtgcaggagattaaacaaccctctgttcgtagcctctggcgacatgacgacggtgacagcgacatagaatcagccattgaccccaacgagaacctcgatcggtacgaagatgactttgtcctagaagatgaggcgaacgaccttggcgttcccaccgaggagctccccttcgagtttacccgacatgcatataagcagccgaaggaatacttccgcgacgtcatcggctggatggtgcaaaacaaactgaacccggccttccctcgctctgacgacatgtacaagatggcattcatgaagctggaagatgaagtcaagggtcgggccggttcacagctgatttcttcagtttggaaccccagtttcgtatatgccctccaggcccggccgcacatggaggtcgatacctttcctacagaggataaccatccctgcgatgcttgcaggcgctctgggcatcccgcgtctcgagagatgaaactctacggaaaggcgtattccctgcaaacgttagagccactggaagatgacagcgatgaggattccaataacgacgacgatggcaatgatcgggaccgggatggccatgtcattcctcctgagaatgtccggtactacctaggaaagtaggttttgtcttcagacacccattcgatcgagtccccctctaactgtttcttttattttaacagacaatgtaatgcgagagcgcagctcacccacacccttactcactggcgctaccatctcaatgaatgggtcatcgacttcctggagcgtacgggccacatggatgccgacgagatcctccgacgaaatgatatgagcgtcaagcgtaagacgcgaaatgcaaatgatgtccttgacagcatgactggaagtggtgaagtcgataagttgtggcgtgacttccacattaagctcaagtctgcccgcgagaaagaggtatgttcttgtagtggggtctcggtgcttgatgctaatcgggtctgtccttcatttagtctatctacggatgatgagatgatcatatccaagaacaagttcgagggtcagtatttgtcctcgaatggctttatcatgaattttcatgaagtctgaaccttgtcactacatagttttgtggcatcgcttttcttttgcgaagtttctccggtgctcctttcacaatgataccctttttttctttctttctttgcacatttctagtcaggtatgtctagctagcctaccaaaaagtacctgcaggttcagccagctatctcaagaaactatattcgcccaagagcctactgagtatctatctccaatgcagttttaggtattcgtaggcctataagtatggctgggattacaatttgcgaagataaccaaacccatccgttttcattacctggacatgcacatggggagagaaaaaaaaaaggtgtataggaaaacaggaagaaagatgattggggttgtacaaatacatgcatgcataagctgccggagccaaaatgtcagaaagcatgagagatgcgaggagagaaaaaagggaaaaaaaaaacaagaagtataacaaagatccgaacaagtcaaaacaagacacgaatcgggaaaccaactctttccgagtgcttgtagtcctatattttgagatctggccaaaataggtgattggaaatcccaggacgtgacagaattttgccgacgtgcgcctgggtatgctgtctgcaggagaccaagtgtcgcggccggtaattgtgtcactgggtccttcgccaatctctctgctttccgaagtggtattaatttacagagtaggttgagccgtcttttcgggttcggagccggggatgagcatctgcgagtaggaatcataattagtatatcgtttcaaagactgagagtccgccgaagagcgcaaaaaatgccattcgatgatagtgtcgagaaagagaaatattatggaagattgccgagatgcgaatacccgaggcaatgtacacggtgtcaatagtgccaatgacagcacgaatcggggattcaagataactgttgcaatgccgaaaaatccggagcaaaaaaggtgaaaaagaagtaaaacacatacctcgttagctcccttgatcattccctgctcgcgctccatctggatgtactgctcctcctcggcgtaggccaaagcgaatggcacaccgagcaggaaagcactggtgctgataatccagagggccttgccgctgaacgaaaaggtggccttggtgaggtttgtgatggaagagacggtgctggagacgttgcggcgggcggatgggggaacaatgtctttcagagcggcgatacgctcgtagagcgactcagcctcgagctcgatatcttcctcgtcggagatctcggagtctattttgcattgatgcccatgttagatacggtactttatgttgatttcagaccagtgttcatttctgggtttcgatgtcgcattgttgaggattgggattggggactgggatgataggaggaacttcagggagcagaatatcttcccatcaaagcgattccccatgcaaatgacaatggcgcgatgcgagtttcgtctgattatgggcgttcgggtttcggtactaaccagtgtctgagtagtcatcctcatcatcggagaccaaaagagcatcgtgtttggtggcagtgggcttatcggtgaagtgctcgtcttcgacttcagtgagcttgaccattttgggcggtttgggtggtttggatgagaatgacgaagggggtctagttaaaggtgatggttgaatgatgggaggacgctctggtttcgctccgacttttttgccgaaaagcggcgaggagcttggacccaccgacaacgatgtcatttgttttcgatcttatgaattacattagttagttactgatgtttacatgaacagtcttttggtgggctttttagtagaaaggtgagttgagaaaggccatgattttaaaagagaggtgtattctacatagtcgaaatgctggccatagtctataattacagattaccacatgacccttatattcgacgcatccaagcgagtcctgaggcatagaatcatctatttaccgtcggccaagcttccaccgggcaatccgttcttggatctcctcccaggggaaggaccggagcttatagccttccaactcgccctcctgcagcacaacagtaggcttaccagtgcccttaccctcattgtggacatctccaccaaagaccttgcgagctacacggcggaggtcctcgacggtgagggcctcgatctgctcacacatctctcggacactgaccttgcggccgtggacctgcacctggcgtccaagatcctcaagctcgaccatgcgagattctaggttcatgagcagcgaggaacggagctggttcttcgcacggttaacttcctgcgcttgcagcgagctgtaaccagtgtccagagtcagggattgcagctcgcggcacatgacctcgaccatctccgtgatccgagtcgggctgcaggatgcggaaattccgaagattccgctatccgtgtagctgtgattgaaagcaatacagctttcgacccaaccgtgctggttcagcacgttggtgtagagtcgcgagtacataccctttccagggccaccggccgagaatgagccaccaccaccgaggagggtctggagagtagcaagagcgtagatatcaggcgaggagatggggagagcctcgaaggcaaggtggatgtgactcaagcgagggagcatggggctcgcggggggaggaatcgaagggagggcgataaagccacccgtgtagtgagcaggttggcggaggttgagcgcggatggctcaaccagggatgagtggagaggctcaactgcagagctcttagaggaagagagattcttgaggaaaggaagctttgacaagagcgaagagtgtgttttttgagaagcagccggactgctgattgtcgatgagggcgtgaacgaaggaacggtcggcacctggccttcgtgggcggccgctggggaatcagacagtgtggtttcgattccgctgccagaaagtacaggacccttggtcttactgatgtcactcggcttcatgtcgccaaagtactgctctgtgagctgaacagcctctgcatgtggcactcccgcaaaggcaaccaccatccgatccgggttgaagaaaagctccctgtaccgctctaccactgccttgttgatttcgcctagccgttcttctgggcacaatagcggatttccaagagtgttgttggcataagcagtcatgtgcaccaattctggaaggatgagttccggcttcgcccagatctcgcctatctcgtactccgcagttgcgagctgttggataacctcctcttcagtgatgaggggatctcgaatggtctccgcaagcaggccgagcgtggtaggaactgccgagttgaaactggcagactggtacatcaaggattctcgagatgaggcacactgaatgttaccgcctagggactccagaatctcaagcatttcatctccagtgcgcgccttggtagacttgaaggctagacggtccataatgtggctgactccgcgcagactctcatcttcgtagcgagatccagcatcgacgtaaactccgacaccagcgaagggacccggtaatgattccgtggccacgcggactccatttgaaagtgtggtgatttgttctagctcggcgggatcctgcggagaaagaaatagttcgtcagttacaaatgacgctgtgttgtaggacctatcgaggctctcttaccttgaccgattcattgacggtagagaggcttcttgacacggcgcgaggagctcgtgtcaatggcttcgcggactcgatggcccgcaatgctgtgcggcgcatagtggttctgtacaaatccaacagcctgattaattcgggatttcttggttgcaccgaatatatccggtaaaggtgtgatgtagctcggacggattgtcggcgaagaatcgtaatcctcgatccaaaatgcttagctaatccgttgcatggtggattcttacatattctgttgacatagcagatcaaagtgaataactaaatacttttatgatatttttgacaagaagcggtgttttactgattttttgacatcattcgtgactggcgtagcagggagtgtctagtccgcttaccccagggcatgacctgcagggctcgaatatacaccaaaacacatggacgtggaatctgaatggaaatttgcagaacaatgagtcgtcaagttttctatgtactaaagattaaataactaagggtgttccgaagcccagtttctataccaatctagacatgaagcattcgcaacacttgcaccaatcttgatgttaagcccacacaaaatctgcttaacagcattctccaccttcttgccattagaagtcactggaatatcaggacatgcgtcaataataccagggacatggcgcgggctaagctccttccgaattgtggactgaatgcgtgccgcgagatccgccggcatacccgactcgttgccagcagcaagccggacaaacagaacgacggtttcatcggtgtcgataccatctcgtctccggccaatgcaaagagaatcttccacctcgtcggcgaaatgcttgagaagaatgttgtaaatttcggcacttccaaatcgcactccggatggcttgagtacaccgtcgctgcggcctagcatgaccacacctccagtttgtgggttcaagcgcacgtagtctccatggtgccagactgtgggcccgaacaaatcgaagtagctcttccggtacttctccaagcctgttggtcccgggggccagaacatgactggttgggctgggaagggtgtgatgcagacaagatcaccaggttcgcctgatgcgctgatatccttgccagcatagtcgaaaaccgagatgtccatgcctagagagcggcattggatctctcctttgtaaacggggagaatagggcaaccggaggcgaagagagagaggatgtctgtgccaccggtgatggaaccaagcataatgtcgtcgtggaaagaggaataaacgtattcgaatgtcgatggtgccagtggggatccagtactgaagatggcccgtagggacttcaacgatactggcctatgggcatgctcgcgcgggttcaaagcagcttgttcgaggagagagaggtatttagcggatgtaccgaaatgagtaatttgaagctcttcgatcagtcgtggcatggccatttctccctttccgccttcagtgtcaaagggtcggaagggtgaaccatcatacaggacgattgttactccactggccaagcccgataccagccagtgccacatcatccaggttgtcgttgtgaagtagaacaagcgatcacctggtcgaatgtcacagtgaagaagatgctctttcttgtgttgaagcaatgttcccagagatccatgaacgatgggcttgggggcgcctgttgtaccggacgagtacaagatatagacaggatgatccggtctcaagcttgcaaactccaatggtgcctgggggttcttgacctcagacaataaatcaccgtagacctttgctttcccatttgcaggtcgaaggtcatctagattttcgtcaagttccggagtagtgataagggacaccagaagctcaaggtctggcagttccgagacaatctccgctaccttcgcatgtgagctgtgtaccttgccattgtagaaggagccattgtccgcaaagagaaccttaggttggatctgcttcaggcgctccaatacagcatgcacaccggtgtcaggtgacacaccagtccagaatgctccgattgaggctgcggccagcattgccacgacggtagtagcatggttgcctacgaagccagcgacacggtcaccggtcttcacacccgcttctttcaaggcgtttgcgcactgtcgaactcgctcccgcagctccttccacgagatatattcgcgagctacttcagtggcgccaatcactgctatggaatcttcatctggcgagctggcgggatacagaagattctcggcgaagttcagagtgctgccttcgaaaaatgcaggtctagggaatagcacttcttttgtatccagtacctatgttgatcggattaggatcggatagctcaagtataaatgggaattactcacctgttcgtatggattgtgggcattgattttcgtatagtgccagatttcctcccagaattgagctggctcagagacactccatttccagagcgcatcgtagtcattcagtgacaagccatacttctcgttcactttagtcatgaaatcatagatctgggttgtctccggggcggagggtcgccagagctccttggcctctggctcaacgatttcgtcgatctgagacatagctatgaggtttgttgcagtagtgcgcgcaataatgccaggaattgaacttcggagtgtggagtgtggagtatgtctgtagaaatgccgattgagattgaaatgtgctcaatctcttgtcacactagaaatcccagacaatgtagcaattgacttcccagcagacaacgatttgatagggcttcacagggtcaatggtcaaagcttgcagtcaaaagcgagttcacacaatgcaaataccccagggggatggcggggcgggaatgatcgggtactgagttgccgatctcctcggctacggggaagataatttctcacaaaccgccccggatatgcattgtgaattaaattatgccgaaggccgaatcttcaggtcggtcacgtttagaagtgacggcctcaggctccaaggttgccattgccgtttccgatcatgattcacgtcacctccatggacatcgggatgtaggtgtcacggaccttgaaaatggacatgatgtgactataagggtttttagtcggatatgccggatgaaccccttatttcataacatgatattacaatagatggacaattatacaacgtctacggagtagagatagtattgctgttcacaatccaatatttatgcatcatacgacttgatttgtctctgtaacttgggtctttcgggtccgagactttttcgagtggaaaaaaaaccccctagtattgcgctggtaatattacatccgcactagcaattatcagccaatcacacgtaattttcgccgtactgcatgcgtttttaattaataccaggaggtcactgcataatgggtgcttagcatgggaaacacggaggtctcgctcttatttaccttctcagactctctccttcttcttcttctccaaccctatactcggtaaaggtgcttcattatctcggtttgtagtgcaacggaaattggtcccttcgtcatccgaacgtagggctctttgccccttcgtgcttcttgcccccattccacgtgcatccgattttttaagccctttcggagtattcggctcccgctcacgtcaaatcaaccttgcggtacgtctcaatctgtgaagctgatgaccggcgagtttctgagtcggagtgacttgggaacggagcatggctcagagtgtcgcatcgatgcctggtccagaacaatccactaattggctgcggtttccagattgaacacattgcctgaggttgccacgactttgaagaccgctggagtttccaagaacacttgcccagtcaaacacatcgattatcaactacttccgatagtccctgccttaactcgtcaacatccggacgcgctcaccccaaagcgcccctcgatcctgacgtgagaaaaaaaaaagaacacccgtgccgaaaccttgcgctgtttcctcttgcgatgcctcgtcgatttagcaacaactcctctaccgacacctctaccaacccgccgtccttttcaccttcttcgggaaagggcggtatctccactaagggccccacggtcaagtccaatcgcctttctcagttattctcggcctcgccaaagtccaagaccgaacctgtgcagagtgggcatcctcaacctagcaattcttctccgccgataagtttggcctcactgtctctaccgacgatctctctatcaacagccactgcggacaatccgaacatggacgagctgcctacaacactcttccagcctccaacccctgaggaggctcgtcggctggccaagcaacatgcccagttcggtcccatcggtcatcctagccaccgatactccagccgacaccccggtggtgtcttcccggagccggtgatggacgagccgccgtattattacctgctcaccacctatatcagttacctaattctaatcgctttcgggcatgtccgtgatttctttggcaagcgattccgcgaggaacactaccgccacctcaagcctcgcaatggttatggcgctctcaacagtgatttcgacaacttctatgtgcgtcgtctgaaattgcgtatcaacgactgctttgagcgccccgtgactggtgttcctggccgtactattactttgatcgatcgggctacggatgaccacaaccagcacttcttcctgacgggtaccactaccgacactttgaatctgagctcgtacaactacctgggtttcgctcagtcggatggcccgtgtgcggatcttgcagaagaatccatcaagaagtatggcattgccgcacccagcacccgagcggagtctggcacgcaggatatgcatctcgaagtagaggatttggttgcccggtttgtgggcaaagaatcgtctatgattttctccatgggttttggcaccaacgcaaccatcttccccgccttagtctcgaagggatgtctcctgatctccgatgaactgaaccacgcctccatccgtttcggtgctcgtctctccggcgcctccatcgctatgttcaagcacaatgatatgaaggacctggagttgagacttcgcgaggctatctctcaaggacaaccccgcactcaccgtccctggaagaagattctggtcgttgtcgagggactgtactccatggaaggttccatgtgcaaccttcccggtcttgtgcacttgaagcgccggtacaagttcaatctgttcgtcgatgaggcccactccattggagccattggtcctaagggccgtggtgtttgtgattacttcagtatcgatacctccgaggtggatatcctgatgggcacacttacaaagtcatttggtgccaacggtggctacattgcagcagacaaggtcatgatcgacgcacttcgtgccaccaactccggtgtctactttggagagtctcccgcgcctgcagtgctttctcagatctcttccgccctgcgcatcatcagcggtgagctcgttcccggtcagggtgaggagcgattgcagcgattggcttttaattcgcgatacctgcgtctcgggttgaagcgtcttggctttatagtgtatggccacgacgattcaccaatcgttccactccttctctttaaccctgccaaaatgcctgcattctcgcacgagatgctccggcgcaagatctccgtcgttgttgttggttacccggctactccgctggtctcgtcccgtgctcgtttctgtgtctctgctgcccacactaaggacgatcttgaccgtgtgttgactgcttgtgacgaaattggcaacgtccttcaattgaagttctctactggtatcgcgggcggtgcactgcctgctgccgaacagccggctcctccgcccgagctggagaaggaatggcaccgcaagcgctcggacaatatttcacctccacgctggcgcgtcgaggatgtcatccgacgcggagtccaggatgtcaagaaccccttgtactagtactagattggcttccttctcctcccggttgacatgacgctgtcttgagttcactaggctttgagatgagtcttcggtcggggtctttttccacaagcacgggttgttgctggtcacaccgtgccggagtcttaatcccatgtgtccccttgctctttgttctgagtttatatgatttttgtgactttcgctggacttggatcctaaggcacataaagcgagtgaatctcctcggactagaaagaaaagagggactcggggggaaacgaaaagatgagttattcgacagcaacgaatgaatatgccccgtctcctatgatccttcttactcttgcttcttcatgtttgcatccatacagaatttcatgttactttctttgtcgctgttatccttctcaagatattgcctaataatgttccactattgcctaatattgttccattcaatgctccacagggagaagatagctaaagaagaggatcttaaagactagaaagaccgctgaaaagactactaaagagtaccatcttcttatatgtacctttcatatgtgaatcctaacgaaaagtacatcttgcgttggaactatgttcaaaggtactaagcctattccaaaacgtcaatccggggaaggcccattcatatacttccaccacttccttcttcacttcttttcctttaaccatcttatctctctatttcccagtactcacttcgatttattgaaaacaaaatgtcttctctgaccaatccaagcctcgccaagtccttacgccaatacatgcagtcaaccttccgcattggccatggaactgtctcccctcgcagtctatacggcattcaagttcctgagttgaaagttgccttgaatgaagcctaccactataaaatcggtgcaaacgaatttgaccctgacgtcgtctttcccgaggttctcaccctcagcaaccaactctctaccatcctacaacaactcacacccgcccaagagaccaagttcgaaaaccatatcctacattgccttgctagtatggtgtacggatccaacatgatcgagcgcgccgggggcgattccgacagcacatttggcgctgtgtacggcaatcttcctcggaaaggcagtggaaggaccagaagagatcgaagaaacgaaggaagagttccagctaccgtaccacaaactgctaggagacatttccccggccttgcgcagttaccgtgaaattgcgcaacacgccagggctgcctcctacatcatcgttcaactctgcatacacgaccaagatctcagcgaagagatcattctccaggctcatagaatcttgacgtacaaagttgacgctgaaaccactccctgggaggaatacagtggtgtctatcgtacggatgaagtctccgccggcctacgtccattcccgcaccacagcatcgtgccattcaaaatgaagggaatggtccgcgacctccattctgatgttaaagaagctattgctaaaggaacactcgaccctgtcagcatagcctcgaaatacacccacgtcttcgttaatatccatcctttcatcgacggaaatggatgtatgtgtcgtttgatcttgaactctatgctcctcaagcttggcagctttcttgcgtgcatcggtgggacagaagaggaacgcattgtttacatggaaatcgccagtaacggaggtgcacttgaagatctgtatggagatcttgatgaagatgagaaacccgtaatgtataaggagctagggagtcttgttctggagtatgtcaaagagagtatgcaaaatctggttactacagtgctttcgtgaagtgtcttaagtctgattttcggtgttaatatttttgtatttctatggaggttttcctgggcatcgatggatggagtgtattaataccccttgttgctagtcaaatgtcactatttgtaaacctgtttttgtattcaaagtctggatcactaactaagtactcagttctgaatctcttgtataatcacccttctggtatcctcatctgcagactgcatgactgtttgacccctacaatcctcgatatccacactcgcacctttatgaactagataccgaataacatcacctttcttaagagccacggccgtgtgtaaaggagtttccctcataaaaggaaacatattcctcgaatattgatggtcttcatacataagggcattaaaaggagcaccccgatcaacgagcatttcgacgactttaaggctgtcagactctcgatagatcgcattatgcacaagctggcctattctaacatcaccaccacgacgtaggagaagatcaatagttgacaaagcggcgtatctggcagcataggagagcggggtattatcgatgtcacagcgcgtattaggatctgcgccatggtcgagcagccatgttgtcatctccgggtcctcgagcgcattgctagaacgagataattgttattcggctataagcttttaaaagagaataggttgtctcacgcaagaataggcgggtccgttctactcattgacgtgttgatatcccagccgttattgaagaagctggtcaagatagtcttcgctctcgccttgacggcttcgagtacgtagattggcgacacgggcattttgtgttggagtagctcgttcacgagatacactttgtttgacctgatggcatcaatcatgacctcgtagaaatgacggatatcgcaatcatcacggatggtgcgatcaaggaattctcgtaactgctgctcgctaagtcttggtagctgctgcactaacaagagcctttttgctgggatcgggggaggagtttgaactcggcttgtgtaaccctgttcaagggtgtgatgaacagacatggttgaatacttgaggtgtagagaaacataacagaaggaaagcaaagcaaaggtactgcaaagaatgatacaggaaggtcaatatcccgtgactattgtagtatcaccatggtaaaaaaaaaagcctgatcagccctgattaatacatgtaagttccataactcccgtgcaaacagaaaaacaaaatcagtattcgtcagtatcgagaggtggaaagagagctccaagagagatatctgatggtctcttaactaaattatatacgcacaaatccttcctgttttggcttaaatgtcctaagctaagcctatccagaacctatgtataactttagatatagacactaaccactgatagaactggaaacaagtgttcagtccggtcaatgcaaatggtatttctatcatgctgagcttttacgcttttatatcaggcgcccgggtcaggccagaatcaaaacaaaagaaaaaagcaagtcgggatcgttccacaagatgggagagatccttctgaatctccaaacagtaggctgtgaagtgcccaaaaaaagaaacagggagaagaagacaaagtacgacaaaaatagaggcgcaaggaaacgcctgtcagcaaaaacagagggatatcattaagattcaaagaatccagaatgtagcaaaacaacaatttgaaaagataaattgaatggggaagaagaaaacagaaaaagcaaaaccgtaggactcgtatactcgataagtcatcaaggaggaagccattccctccaccaaatatgtagaatatttctcgtcggcagccattcactcgtctttcagacttccgaccaaattgcgcagcacgtccatgataacagcttcgtcttttggctcgccgcctgggaatgagctctctggcgcatcgcccaacacgcgtgcgcgcgcactccggagaacttcccggatgtagtttttgtcctcgtagtcttccatgagaacagcttcaaagtcatcgattgccttattcgctcggtcaatgaatgaggatgactctggtggccctggtgtttgctgagcagggtgttgctgttgatggtgaggatgggccgggaggcctggaggtggatgatgctggtgttggtgttggtgttggtgttgatgctgatgctggtgctgcggctggtgctggtggtgaggtagcggatgttgctgctgaggaggatgcgacatgggctgtgactggggtggaaccggttgttgatgcgggtgcggatgctgatggtgttggaactgcaccccgccagatggagggtaggcccgaggctgcgggttattgtgagggggttgagaggatggcggcttttgttgtgaataaggggaatgatgctgaggtggtccatgaggaggccgtggggtttgcaactgttgctgctggccgccttgcggagcgggggcggatgcgtagggcgaagtgtaggttgaagggatggtcgctgcgaatgcagctgggaggttgttacggagctgactggggatggggaaggatgcagctggattgatagctggtgctggtgccggtaccggtgccgccgatactggtgctggtgcctgcgtaggtgcgggtgtcggtgcgggtgcgggtgcgggtgcggacacgggtataggagccggagtaggtgttggtgctggtggtggaataggagcagagacaggggcaggtgtaggcgccggtgggggtgcttgtgccggtaccggtgccggtgcagcagccgggggcgggggcggagcagtagcagtagcttgaaccggcgcagcaggaggagcggttggtttaggagcaggggccttcaatgcaggtgggtagggactagaccgtggtggaggtcctcctacattcacagatgccgggaaaggagcaggcggtatggaagggaattggaaatgctgtggcggatttggcaccggtggtgggccctgtggtgcataagagtaggacgcctgaggcatgtactgctgcggagtaggcgcaggaggatgggacacctgaggcggcggcgaagggcgtcgtttcttttccttttcaactgacgcgcctggaataagctgccatgaccagcccttgccatcgcgctctgcgtgcatgaacaaatgaccgttgccgttcagattgtgccgtacgctggatgtccaaccctcagtctcacacttgaagcggaagtacggatacttcagtttcagcgcacggtagatctgcttcaaggtcattggcgtgccggcttccgtcagagcatcaaatatgagaacggcgtaattgtatgggggctttgccagatcctcagtattgtaagcagactctggaggataattgggagatggtgaccgtgatggtttgcgctttttgaccggtgggggtttgacatattcttgcgcaggctctacagacaccttgccttccgttgagggaagaggagactccattggtgtaccatccggcttctttctcttggtgtacttccgcttctcggatggttttggtgactcgggaacgacagattctttggcaactgtcttcccagccttgggcactttaggtggaggtggtgtgatacctccgttggcctcacgcttggcagcatttttctgctcccgggcaagctcagctcgctcgcgcttggacataatcccatctttaggagggcgtcctggtccccgccggcgtgtcggctgtgaatcgttatccccattttcgatagaatccatcgcttgggacgatttggaatccctggtcttcaggacgatcttctttgaaggttctctgctctcgccgctatcgcttccaagtctgtcagactcatcgtcttcgtcatccacttcaatcgaagcccgagcatcttgctcttcctcctcttcttccttttctgccaatttttcttccatccggtccgctccagtttcgccaattgggacgtctggtagcaaaaatcggatgcgcacgcctccaatttggatgtaatcaccgctgtgtaacgggcgaacttgccccggcgatagccaatcagccccaatgaatgctccgttacgtcccattacttccatttcgaacaaattccgatcaaagttgtatgagatccggacatgcctccgagaaatccctcgatggcctgcggcactgccgtcaacggtcgttggggggtgaattgggatggtgggacaagaatcaggggatgggagcaaagccagcgcatcaacgggctttgcgtctccgtttccatcttgcaaagattgcattgcgagcgcattgtagtcggttgtcgattgtagttgagccgggtttgcatgtaatggtataacagcttcgtcaaaagaggatcttgaggatcgtcggctcatgttcatattgttcgggagatgcggaggtacatctggatcaaagcccatgatacctccccgatcactgacgacactgcccatcatagcagcgctttcctctcgcttcatacggttcggggtgtgtgatgtatttcctccacttgaactctttgcccgagtgcttcgtacggcctgccggtactggaactctcggtggtgcgcagcgcgggcagcgcgcacgtctcgtcctaggataaatgagtaggtattgacgtaaaaatgcccatcatcgaactccaatttggcaaatgcttgaatcttaggttccgatccagcgattgaggccgccatatcttgatatcccagggctgacaggtcggcattttgcgaaagaaaggcggctgtgagcatctcattttggtggagggcttcaaacgcatttttgggggccgcggaaaaatccaagggtggaaggagcgagggctgctctgggttcaatttcgggttcatggggtctgacaaggtctccatggcatcggttgagttgaattctgtatggttcatatcctggtgcgcggaatttccctgctcatcacctaaagctttcccattcagcaagtcctgaatctcacgggatatcgaggttgtgtctcggtgcaagctcgggtcgatgggcgtggggttctgggcagccatgtcgaatggctgggagattgagtcgtccatcttgatatctatgtgagtatcctggtgctcctcctgttttgcaggttgtaccatggtagtggagtttgcggctgattggttgccgaggagctgtgcgaggagcgcacttgcggcgctttgcgtatttacatcttgttgatgttgcgcagctgaaaagtcgtggctgtccgagcattcggtttttattgcgacgtccggggcgggcattccgttgggagttgacggggcagaattattctgcatggcgcggattgcggagtcgtctcgaggattggaagggggtgtggtgtctggtgagcagccatagtcgtatagggggctatcggggcctgggtcaggcggtcgatggcccacggctggcgcagtcatggtctgcgacgacatgacaggctgttgctgaggaagggagaggaatgaagttcctataagaagggaagttctcaacttggaaccgggcggtgagcgatggccgagttggtggctgcagatagccgtagtcaccgcagagccatgtttttttttttccttttttccttatttttcttcggctctcgaaatggcgatttgacttgcagaattcaccaacaagtatgaatctggaaaggtttacggttggagggatggagagaaaaagcgccgatgatcctcttccgggacaaattttcattcccgccccgcctaaatccatattctctccgaattgatccacctatatggattgcccgcaggtggttctcaccgattttgttgatcaaaagagcctagaactatataatgaatgtggcaatttatgaccctatgcaattgacctcattatactcctataatctcacatttcctcggtcttttctctagggtggagttgacccctctagtatggcttgcctccacgttgagatgaggggaaaccgtgctagtcgtaataggtactttaggcaaatgcaatttctatcttgtatcaagtccgtatatgcaagggtatacgatgtatagtactacacattctggggaagcggagtattacttgacacggggttaggtgtctgcgacaaacttggcaaaaaatgacagaaaactcagtgtttcttctgcttcgctcttttgctgaggcgtgcttggcgaatctaaacgaggagtagcataaggaccggcctggctgaggctgagagagttggcagaaacctcagccgctgaatggttgtcacgactctcattgtgtccctctgatatgacgccaaccaaattttgatgggttgaaagcgcatgtgagatcctgtgattcaatcatatcatatgctcacaggtagaacccgattataaaatcggcaccgacatccatgctctgtagggcttggctgttgatttctcccgtcagaggacacggcgaatcgatagtgcttgcgagattgtcagggtgcgagagtcgaataagtggaagtctaaatcgatggttaactaagggctctatataaaactagccgcaaagaataacttaactacaagaaacatcacatgaagattcatccaccactgccccgtaggtttgaagttacgtttggagtgacatgagacgacagagcatcgggctcgtcaaagcgagcgacgttcagaagaatatgtgttttgataatctcttgtcgatctatgttgtagttggtctaggacaatcatgagttagggccggagggtgggataaaaatagaatgtgacgtcacctttctgacaacaccctacctctccttcttccacttttgaatgctggaaaccgttgcagcatgacagtattttgcccctgaataattggtgggttcgctatagaaagagtgtctagaattaaggttagccgcagaccttgccaagaatagccgcagcctaaggggatcattattggctcagatccaagacccaaaatgatacgtaatcacttagcttctctagttaactattaactagttaactaactagcttttctattctataatcctctccgacatccaatctgatattatcggtagatagaggtctatagatacaaattttcctaattagcctatcccgactcctggacttttaaaactctttgtaattggagttttatactagattatataaaagactcccgtcttaacagttagcttacaatcacttcactagctttacgtcgaagcaggagtgagtgttacctgccagatctttgtagcaaaagagtgcattggaacgagattattaagtacaagaagagacaggaaagagaggagaggggaaactcggggtatacaaaatcctacccatctgggaaggaacgacctgagatagtaatctaacccccgggcaaaggtgttttagtccctaaatgctggtttttcatcgttaacctggtcattaagtatccggtcgtcctcgtagcttcaatctattcctgatccggtttttctgaaacccaagaatgatcctctaggtttacaattgggagtcatgttacgatccaacgtttgctttgctttgcttgtttgcttgttttctagatagttgagcgagatgattcgaaccttgcattgtttacaaagcggtcaggatacagctataagaactagctgtctcccactttgcaacttgcttccttcctctctctccctatcttagttattctgaattcaatgcactcttctatcttgcaagacctggcacgtcacaagttccatggttaggaaattgatgttaagtgtgggaaaatgtatcaagtgacctcgctttgacatagttaatgagaataattctctcccactatggaggttctgccggaccttgtcctccggatcccgcccgtcttggctcacatatgacacatagttaagagcctcaccctctagttactttaggcttcgatccaccttccaatcgactctcccaccctcccacccacagcaccccagcgcagctcgaatgacatcctcgttgcccggattccgcaagggcttcgaccctagaactattatcacccttgataaacccctctcttcccggtgggaaattcttgagaagctgaatgagtatgacgatcaggtatgacccctctcatcccattacagggtcctcgggaatctgaacgagcataattggtaggtcactgtggaggaaaataaggcatatggcctccgttctttcgccgaagctaaatttttatgttgtgatcctcaacgccgtgcaacgaaaacctttatgcgagtctacattcaagttccccatcgaacaactgagatggatgatgcggacaccagaggccagcaagccatgtcatagatcccgcatgaattagcttccctgctcgatctaactgaaaaggactcaaatatcacaccaaagctcctcggatacaagaccggtactcaggatcgctcagggctagttccggatgggttcatcatatggcttgcttgggaaattgttcctgggctacgccttggcgatagtgatggcgatggtccattctggggtcttgaaagctctgaaagaaagcaaatccgtgaatcccttcttaaggctcttgcgtaagttcgatattccttctctgtatatcactgaatctaattattattaatgttttagcaagctgaaggagtatgggtggtgcccgagcgtggatagggcaaaaggtctagtttggcaccgagagactcaaacactgtatgcgaaccacgttatcttagcttacttatttactgattgaatatagctacttcatcggtggcttctgcgagaccatgaaggataagcccatgcgtgtcgcctgctcaacggttcgcgacttttgaacttgctttaccggatgatccagtcagctgggaaatggaagactgggataaggatacttcacgcaggaaatggtagctaacgaggaagtaaatgttccgctcagcctcacattgatctttgcttctgagcccagggaagagagggtcggtgcggcagtcgcgcgacggagggtgagaatcacccgctctcacctggcttctcactcacccagtctcacccggacggcagcaacccgaccttctgccgcagataaaccacacaccggtgagtaagtagttaggtgggagtgcctcgctagctatgttgtacagaccatgactaggacggactttgattcgagcctctttctccaatgtccgagaagctgatcaatgaaatcctcgaatgcaaccacgagttgtatacacagcccatatgctgtaactgtcggccataatatctgagtcactgctagcagccccaacagcagctttgtttgtaggcacacccgcttttgatcatggaaggagtgtatttgatttcagtgaggtcaaaatcagaatgagatagttcccattggcgcaaccagggttgacaaagctaatattcacgtccgggttctagcttctggatcctgggggacaagaacaggctggcagctcatcacaagtgggtgggtcctgacccccgggggggggagagaggatccccgacgatccccagaaactaggctggccaccacgtgacagtgggtttgattgtaataatcaaagatcatattttcgcgataaaaaaaagccaatcagaccctttacatctacctctttctataccttcacctcacaaagaacaaagacccaaatggccccaaaacccaaatccaaaaagcccgacccaaacccgcaaccaaaaaccacaaccccaaactggccacccctccgcccactcctcccggccaccgatctaaccctgacccccgtcctcccggaccaaatctacctaatccgcaatttcctcccaggcaccctctgcaaaacctacacctcattcctcgcctcgctaccactaaccacaacaccgggcgcgcccaagaaagacgaggcattgcgcgtcaacgaccggttccagatcgacgatgcgcggttcgcggagatgttgtggagcacgacggcgctgaaggagcttgtcacgacgcgatttgacgaagacgagtccgacgaagatgacggtagtcactcgcctgctctcggtcttgctgaacgcgcgcgacaactctggggcggggagccgttggggttgaatcctaatattcgcatttatcgatactctgcaggacagtttttcggacaacattgtaagctctttcttcgttcgtttttcgtgctgcgaattccattatggaaccatacacatacatacatccaagcaagcgaaaattacacaacactcgttaattaacccaatcgcagacgacgacgccaacaatataaccctccccccaccgaactcacgctcaaaagcaacacccgcgcgcacgacctggaccctcctgatctacctgacgtcctgtacaggcggtgaaacgatcttctacccggagccgacgcgcgcgaaccgtcatccggagccgatagctgttgcgccggaggttgggatggcgctgttgcatcgacatggtgatcattgtatgattcatgagggggctgaggttactggtggggagaagtgggttttgaggagtgatttggttgttcctaggtgattgcattttggagtggcgaggttgtagaggtgtagtatttgttaggtgtggtagaatcgtagtgggcaggtcctacgcgatctcgaatccgtggtgtttggtatatagcattgcatgggaattttagttagggaattaaacagttctagtcattctgttggatcatacttagtattgggtgcaatcgactggataacacggtagcaaaaggacaatatgaacaaggacgacagtaggtccctgtcacagcacgcatgaaagagacagttgtagatacaagttaaatagtcgtaaagagtggaaagtttgctggggaaaggagatgggaggaaacaatgagaatgaaacaaagagtgagatcatcagttattgaatagcagggtgacagatgagagctggacctcgccaatggatctaattcccggaaagcctccagattcaatttcattttatcttatcaaattggtttggaaacaggagacttctccccgtccagttcatactcggctcctctcatcatcccctccacagggccgagaagccgcttgaatccgtcccggcccaaccgtgccaccttcacatccgttttagtggtgatgctcgcctggcggggcttgtcgtccagcaaggcaagctcaccaaagtaatcacctcggtgatagctcttgacgggcccagagacaccgttcttggtagcctcggcttcgcccgactccagaagatagaatgcatctccgggatcgccttcgtggatgatgatggaattagccggatacttgatagtatccagagcatcggcgatcttcgagcgctcgtatggcttcagagaagaaagcagcgggacttcctccagaaaagcctcgtacatacgacggcgttggaatgcagagtccattaagatgcggcggaatgtgacgcgatctagagcccacaaagtgctctgcggctcagtggagatcactgtcgcagcacgcggggcattgtacatcagagccaactcgccgaaagatcctccgggtccagtgctggcgaccttgttgcccaagccatcaggaccaggctgcacggcaccagaaggattgatatagacgtcgaaatttcccttctccacgatgtagaagtaatccccggcgtcgccttgggagatgaccttgatatccttcgccggaatgggcttctccaccagagcattgagcacggtcgagaatgaatcatcgtcgaggtgggagaaaaggaagttgctactgacggcgctcttgagccgggaggcctgctcttcggtctttgggtggtgaggaggcgaccaactatctgaacccgcttcagtagggtttaaagattccgctgagaccgatgtccgacgaccaagcgcgtagttggtagggaatccttgctgtgcggatcgttccgggagaggggcaagctccccctcctcctcgtcatcctcccccgcattatcctggaagggactccggctgaacaacgatctacccacttgtaatccttgtgatcctccttcagcgaatgcactacctccaaacaaagcggcgctcggcagcgcagcacccgaattaggctgtcggaaggtcaggttggttggtgacgtcacctcgaagccgtcgtcctcggaatttttttggttgccagcagaattgtcgtcaactctagtgttgacggccggggccaaatccggagcagagtttagagccatgagggcgttggattgagggccggagaggccgcaactccggggttgaagctgagagagagggacgggcgaaacagagatgagatctgtggaaattagaaaggaatgaattaaataggggagaatgaatgggatgaaaatgtaggtaatgcagattgtagaggagaggaggagaggtagaaaaggtagagagtaggaagcaacggaggggcagacagtgggggattattggttggagtctaattgtaggaatactgcatgacctcgtccctctccttttttttctctccttttcttttctctctcctttccgttctgctttcttttttctttctttctgtctcgggaaaataaaatggaatattgcagggaaaaagaaggagaaagaaaaagcaaaagcaagtcaagccaacaacaagcgaaactgaaattaccttctaaaagcaagctcagctttacttataacaagcgagtcagtttggaagacaaagggggaagacgtggaaagatgaggggtacacactaaagttggtctgagcttcgtcgatcattggatgtgcttcacctttcacgcactgtgctatgtactccatgttgtacatatttatggagtaatggtgatcgacatccattcctatactaagatgtgggatactaggtagtataagatttaatttaagcccccgtctgagcgtcttctacacgtcttctagaatggcatgctcgccactaaagtggcaatttcgggaaccttggaagtatcaccacgtcacacatgtcatggactcgtgttcaaatgtcaccttatagaacgggataaaaatacctgaacggcaaaatcaaggaaagtgtcaagagtacagacgtttcatgctctggtggggaacgagaatggatatcatataatccacggtcttcgctcaataattgtagaagcatccagcatacctctatctagctatagcttcaaatacggaaccttgacagtatggagtacttcgttctccgttgataacctaaagctctctccatggcgtcatataaacgagaaagtctagatcgggcgcatagacccagccacagccacggttcacccccagcccccttatattggcgattggccatgtcgatgtgcatgcgaagtctgaattatagagcgctaagtactgtccagggccaggtactggtctgtgtcaccccccaccgattcgaataatttacttgggcctttttccctatcttccccaaactatcttttcatttttctcttcacgttctgtgtcagaatcaatatgggtacctttacatttcactggtgagtcgcgcttctagcatgtcccattctcgagatttccatttcgaaatctctcctcctcgtacaatgctgagacggttacttgcaggccttacaatgcgagcgaggtgttcgttacaggcactttcgacgattggggtaagacggtgaaactggaccgagtcggcgacagctttgtcaaggaagtgactacactgcctgtacaaaaagtccaatacaaggtatggcctttcttttttttttcttctctcgcacactttcgcctttgccttgccctcgtagattggatggcggtgagcatttacaatgacgtcacctgggccgctttttccccccatttataaggtcgccagttcccggaatccccaaagtcccaaacattttaagattgcctgattccccgctgactcaaaaaaattcaaaagtttgtcgtcgacgggatttggactacagaccccaaagcacgtgaagaacaagacggacataacaacgtcaacaacgtgctgctgcctgaagaaattaaggcttccgactccgcccccactatgtctggcgtgaccccttactctacaaccgcggcactcgctgccaacgttcccaaggagcccaatggggatctccctggtagcttcccagaaactccgggacaggaatccgaacagaccttttccgtggatcccattccagcttcgggaggttatggtaaccccgttaccctgaagccgggcgaggaagtcccccgccagagcacattcaacaacaataccgttggctcaactgtcactttggacaaagaatcatatgacaagggtcaaactctacctgttgacggctaccaagcaaacaacaccagccctgagactttcgcatttgccccttttactctccccccaatcacgaacaatatgattcctgaatccagtcttccgatcggtggaccctctcagtcgtacaccggaggtccagcgcagcaggcagcgctagccgatccggaatacttcatccagtccagtggccccacctcgaccacagcggaactcgctgctggcgtgccgctggagtcaaagggcaaggccaacgccaacaagcccgttgatgaggtcccccgggtggtgaaagactcaattgccgaggctcacaaggaccctgaggcgactacgaaccaggaggcacttgctgagaagtatgctaccgagaaggagctacaagaagtaccccgttgaaaactccgcagggaggttcgttcaacccgttgacgaggttcctcgggttgtgaaggactcgatggccgaaggttataaggaccccgaggcggctgcaaacctgaaagcagtcgacgagaaatatgccaccgagaaggaactgcaagagaagttccctgtcgaggactctgcgggtagacagaccaacggtcactaccctatccctcgggcagtgaaggactcgatatccgaggctcacacaaacccggaggcgactacgaaccaggaggcacttgctgacaagtatgctaccgagaaggagctacagcagaagttccctattgaagagtctgcgggaaggttcgttcagcctgttgaggaggtccctcaggtcgtgaaggactcgatggccgaaggttataaggaccccgaggcggctgcaaacctgaaagcagtcgacgaaaagtctgctaccgagaaggaactgcaagagaagttccccgttgaagattccgcgggcagacagatcgacggtcactaccctgtccctcgggcagtgaaggactcgatagccgaggctcataaggacccggaggcgactacgaaccaggaggcacttggtgagaagtatgcgaccgaaaaggagctacagcagaagtaccctgttgaagagtctgcgggtagatataataagcccgttgacgaggtccctcaggtggtgaaggactcgatggccgaggctttcagggacccagaagcggctgccaaccaagaagcagttgacgagaagtatgctaccgagaaggaactgcacaagaagatccgtgttgaggagtctgcgggtgcaccggcgcctactgccactgcggccacccaggccattgcgccccatgtcactgccagtggtgtggactcgtcagatgtgtcgccactttccacacctacggcgaaccgcagctttactgctgctaccccatcttcagcgctgaagaccaccgagtccagtgggccgactgtcacaactggccccgagactacttctactgccgaaacctcgactgccggaaccacggctgccgcgactgcggatcccgcaggtcccactgtgacgacgggagttgcatctgctcaggcacctaccagctcgaccgcagagccggcagatcccgctgcgaccactggagctggatctacccagtctcctgctacttcttccaagcccgcttcgccgtctcgcagaaaatcccacagcacggaaggtgctgcttctactattggtgacaagaagaagaagcaccgcctgagtggctttttcgacaagatcaaggagaagcttaaataaatgactcggaaatgtccaatttccgaccttgggatccgttctatgattctatcatcttgggcggtatagtcttggctgtgaaagccgaccgatatcgcatgctttttctctgatgccttacgttctttgcttctggatacctctcctgccctgttttactgcattgtatttctgcaagccgctttttgtttatgactcggctagtaattatcgtctaatcgaagtaccttgcttgatgtgttgattgtttatatcgtactttatgtcttgtacttgtatctaagccgaaatcggaccaaagtcttgcgtaatatgttgtacagaactcggagtataagcatgttgattcgacatggatcatgaaacatgaggttaaagacccaatcagaatagaacctgagaactaagaaagtcgaatgtacaattctccacgtataacccttgggattgcccttgtcatgagtggggagaaggtcattccctaattccgctcttctccacctttccccgactttggggacttccaatcttctttcccttctcctcccttcttctctgcattgtacaagcgaccttggtcttgggggtatctacaccaccgcgagcacaatatggctacccccacattgtccgccatgatcgacccgacaaagcaggccgaatacccaattgtgctaggggaaaggcttgctcgaaacccaaacacgagccggctgatcaacgttaactacaaccacaaatccaagtccgccacctcacagcaacgttcggtcatcacccactcccgatcggccgacctctatgacctcgccgtgactgataaggccccgaacgccgatcaaacgttgacctattcatacaaaggcagcgaggacccgtcgggcgagcgaagcctggtactcatctttgacccggagcggaaagtctttgttctggagccggtctcgacaaccttgaactttaatctacggtcggcaccaggaaagacggaaaagcaggtccgcgagcaatacgaacaactacagataaaggaagaagatgaaccagcgaacccggtagaagaccggcacggaggaagcgccagcgaggatgaggggccggccgacgacagcaatccctatgacttccgacatttcctcccgaagaatcgccgcgaggaggacaagccgccctcgggctacagcaccccggaacttgtcaccagccgggccagcacaccgttaatgccggctgccagatccgcgccgagacccgcacctcgacccacaacgcaagcaaaccccctacgacagaagagaccgccagcaaaagcacccgccaaaacatacaagtcaagcgagccggtcatttatcccgacccgtctgagcacggggactcgcgctcgtcgccgtccgatgcaggcaccgggtcacaacaagctgggcagtctcctggctcgaatatcattgtcgatggagatctcattattgatatgggatctccacctccgcgtccgctcgtggaccggacttacttctcgtcgaataatacaccggcagatgacgatggcgacgaagacgttggggagtttagtctgccctccccggtcggcaatacagctccactttcctcagggcacacagacacggctgcccaagaggacgaaatggaagatgatgatgctttggcggcagagatggaagccgcctttgagcaaagtgctcgtgaagaggaggctcggaacaaccagtacagtcagccaacgaccaggcaatatatccccagtgatgatgagagcgaggtcagcgaggaggagtaaatgtttggctttcttgtttattgcatctaccagcgtggcgccaggacggactttgattccaacgtactagataccaattgtaattgtagtatatttgacctttccactagttcagaatcgctgttctatttagtgcattgttctacgcatcttcgcatcttccaactcatgacataccaaagttcaatggcttcatccccctatccaggagggcaacacaaagatcgttgtttttccattcactagtaatttgggggtgtgcaaatagtaattctcctataaagtgtgcattgtcatctcttacatcggataaatagttccttcggataaaccattgttccgaccaaaagcttcccttgtcgactgcgtcaatacggagatctttgccgctttttaagttacctagtagtgctcaatatctcggcagcactctgttgtttatattgcttatatattggttatccctgaattcccttctccaattctctgaacatctcccgcggtgcactatcatatccgcgatgcgatagaaagctccgccgagctagctttggcttacgactgtgacgtttgtaacgataacgactattgtgaaccacccgcgcaagctgttccttatcgcgcgctggatgcgctttgcctcggtcgccattgtgtgaacaacccctcgatcttattctctttcccctcttcacacagcggccagccatggcttcctcagcaccgaagcgacgaatccccggcctgccgaacccggtgttggaagcggagcagcaaaaatggctattcaccgaggaagaattcgaccgtacaccatcgcgcattgataagatcgagcgtgggaaagaggactacatccgccaccgtgcagtcgacttcatttggcaagtgagcgtgatgttgaagatgcccccgcagacctcaatgaccgccacggtgtacatgcatcgcttcctcatgcgctattcgttgatgggccaatatccggagatggggtcggacctgatgcacccgaaggtgatcgctgcggtggccctgttcgtcgcgttcaaggtcgacgaggccatgcgccgcatgaaagactttgtcatcgcatgctgccgggtcgccatgaagcagccgaacctgattgtcgacgagcagtccaaggattactggaaatggcgagacctgatcctgcagaacgagagcgtcatgcttgaatacctctgctttgacctacaggtcgagtccccttaccgcattctctgggactactccatcttcctaggcgtcagcgacaacaggactttgcgccactccacctactcctttctcaacgactctacctacaccgtcctctgtctccaatttccaccccgcgtcatcgccgccgcagccctgtacgccgctgcccgccactgcaaagtcgccttccccgacgacgccgaaggccggccctggtgggagcagatcgacgtccgcctcgacgacctcatccgcgcctgcaccttcatcgtgaagatctacgagcgagtccagcaaagcctcagcaagggcttcccggatttcgcgcttccagactcaaccccccaacctaacgacccaacccgcatcttcgacaccgatcccacaaaatccgcctccgagcagcaatccatctccacccctcctaccctcaccgtcacctcagacacggcttcaaacggccgcaagcgctcgcgcgaacccgaacctcaccccaccacacagtcacaaccacacccaccctccccaaaaaacaaacccccttcaaccctcacccttaacgggaacgggaacggcgaccgcgatcgatcgcccaagcgccagcggaccatcactccctccaatgaagccgtcctccccacccaccaaaagcaaaaccctcccgccccctccaactcgcgcgtccccgcggcagcattatctcaaacaaaagccacgcctcaattcaaatccatgtcagtcgccgaagggaaaccggaaccaggaccggggtcctcctcaaaaccccctccgaaagaagagtccagcattgacgtcgaagaaggcgaactccatgaaaaacaacatgtcgttccagtcgcgcatcccactccggcggatgtggattctgattctcggagtaaactagactcccggaaagaggagaaagaggagggcgaggctgatgatgatgatcgtgctgggagtgaagaaggcgagatctaggagtttgggcttctcaggtcctgtggatatgatagtgggaggatatcgacatccacattgtttttgcttgtttaccaactttgtacttatgtcctgtgtcctgatttattaggtgtagacaaaatatcttatgaatagttctagttaatgtcagaagaagacgtacgattcaatcctagtttccaagtccaagtccatagccagacccaggtctatatattcgtagctatgctaaaaaaaaaaggcactagctacagtcaactatctacctaactaaagcgaatgattacagacaaacatcttcagtgtcgcgcggggaaaaagaaaaaaaaaagaaagaaaggcccagccgtgatttgaacacgggaatctccgcattacaagtgcgacgcgttaaccactgcgctactaggcctgcggtgactgattattttgtataccatttcttctagccattttgtttcttttctcccagacagaaaaaaagagaaggcccagccgtgaatcgaacacgggaatctccgcattacaagtgcgacgcgttaaccactgcgctactaggccggtcaaggttactgaattttattttagagacgttataaactaaccgcttttaaccccgttacgttcactattgtaaatctctctcttatgtgaggtgtacaattatcagctagactgggtctacgtctgtcatttcgggggaacttggtgaatgggatgcagtgtttgacggtaactgaaatcaaaaatatcaagcagctttggactacaacaatctcaaaccaaatttacctgttgattactaacaaacattccatcttttttagttactcaatgatcaaaagcggcaagaggtgagcaccaaagcagaaaggggaggtattaactatccggtacatatgacagagaacgtttcatacacagtttccgttaattgattttaaattcaatgtggtagatatattaatgaagccgcttggtaaatatcggactccgcatccttcgtacccaacaggcaaatttggacgcaacaaaacgaacacaaaaataaataaacagaaccaagacaaacaaataacaaaaagccaacttttgaatgtagatcggttcgatctcaaacgggaattgcaaggtgctcgtgatgaaaagagacaaggtcatcactagcctcagcctggccggacccgaacgactgcagattccatttctcaacaccctccacgcctttcagatcattcgcaaatgtactaaagaggtcacgattaagccgttcgtactcggagtattccttgggccaatttccaaggcgttcaaccgcaagtttgagcatatgcaaatgctgtcggacatgcttcccttcttccatgttttcgtctggactggaggcggacgaaggggatgagatgcccgagatgacatccatgtccacatcgctggcaggtgccgaggacgggtcaatgaacacacgcaaggcattctcgtgcagcgcggctgctttgcgatagtactggtaggccagcttacgccgactcttctgggtttgatagccttgagccacgcttgtatacatctgtgatagtagaatagtcatctcaaccgtacttggatgtcggggtccatggacacgagcacagttgtagacaagatcctccgcaagccggacagctccactataatcgctgatgagatagcgggtaatgaccaacatacgcccgagcgcaagcgtatatgaatgccgtggttgtgacaaagcataggcgtcacggctattccagagggaggtgagaacccaggccatggtgtgataatcctgttgctcatctagaaccttgatcaagcgattgatgtgttccagatccaggtgtgcgagctcaaagttgtgctccttgaaatattcgagagtatcacgaagaatcgtcgctgacacgcttagcatgtacttatcggccgagcctgctgggtgtatgtcattgtcttggccggccaggagaaggcccagcttgaacactagcttgagtgtcgcatcggacgagtagccatggtgagcaccgatgtatttcgtcgctgccaatgcgatgtggcaggcagattggtaatctttggagcgaagcagctggtctacgcgattgtaactggcgatggccactgaacgcataaagtcacgcgaggaatgagtgctgaaatattccagaactgtctcaataaaagccttagcctggttagggccgatttccaggttggaaccctctgtcgccaagaagaagctggtataccgatctgccacctgagtggcagtggatggacggccgcgattaagtaagaagccatgcaggcgggccgcggtttccgccgtgtcttgaagcttgccagtcttggagctgagggtttcccggaactgttcaaagtatatatactccgtggtgagggcggcatatatttcgttcaaggtagtagagttgtccccgcattcccggatgctatattcgaactgagcaaggaaagcaagggttgaccgcccttttgagctccggtcaaagccgagagcactctcatccttggtgtccttggtaataacatgacgatatatctcgtttgagagttgctcggccttttgaatttgaccagctgcgatatagccagatgcaatactcttggccgccgcaatcaacttgatagagagcgtctcggtcgatagcacttgcattgctgcttcctgtagcagcgaaacagctgcctgtgccttcccttgtttagtgtagagtgagactacctcccccatctgagatagggcttcctcgtgggcccatccatagctggatcgaatcgacgcgagtcgttgggtatgaatagacaacgtcttctgtagctcctttgttgacatgttctcaacctttaaagtagtgaaggctgcactctgctgctcgtggattgcatccaaggtggcacggatgtcttgatagtcgatttcaacttcactggatttaatttgcaaaagctcttcgtagagttggaccgcttccgcttcgaactgctcggactcttggcagatatttgccaatgtgttggttgcctgtatggtgatcgacgcgctcgcaccgaagagagtaatgcacgatttacgatattgcactgtcacatcatgaatggtggtagtgtcactgtgtgtcatttgcagacaatgaacataacgttgatagatggtctggacaaatcccggatcccgcaatttttggctgatctgggggctctgcaaggtagtgaacaacatccggcagggtttcagtgcgtccgcgtatcgattttgcttcaagagctccgtcgccacgataacaagtggctcgaaggcatccggaggacaggtttcccagcccttgcttaggacttgaactatctggcgataataatccactgcgatgggttgcggggccgtcagctcggccagggtccagagctgtcgtatcacagtgggatgctccccgccgaaccgcttagtataatcatccagcatatcctggtggatgttcacgacttttccggtctgggaagtacgctcgtatagacgaagaagattcaatgtggctcgctccacagtttgctcgccgcacactggccgatcgcgtcggactgcactataaagccgggtccggatatcctcttccttgaccgggtgacggcggtagcggtagcacccagcgaggcgctctgcaaaatcaacgcagtgctcaacattagttgatggcaggacgaccttttcgatcgaagccgcaaacaacgacggccacatatctcgaaggactcgtttcaacacccttgtagcatcatgccaccggtgttgagacaagtacatttcgattagcgctgtgctcgctgttgcgaaattttgctcgtcactggatgaactagtataaaccatttctttcagggttgactcggtcagcagagattttgcagatgacgagtgcatcagttgccgggaagtggactggatatttctttccacttctttgcgggtggcactctggctgctagtactttgtgcgcagtatttgaacacttccaaggccaacacagacagtcccacttccttcatgaactgagcaagctcaagcaactcggacaccaaggcttcggcactggaggtggttttctcatactcctcccaaaccccggcaaggatcgaggccgcttcgttatctctcttccgacttttgaggaatttggaatactcgaggacagtccgcagaactgacaccttgtgctcagtggagtgactgagccggtatgcctggctggtttgctgccatagctcaaggtatgtccgttcggcgtccgagaagtgaccctctgccctctgtcgctccgctttcgtcaggatggtcttcaaatcaaatgaatttgtaatcaactcgtccacctctattccagtcaaatccaggggggtgcttgtctctggcatcgtgtgtttggggccgtggaggtggactagtaatgactcgtccatctgcacagatccgctccgctggtgcgtactgttgacgaaggacctctccaaattttcattaatctcctgtactttgcggtactccttgaccagactataatgctcagacagctgcgtcaacgtggatttgaccacactacttgtcgctccgtggtggaccttctggcattcaaccagcatctggagaatctggatgcgccgtgtcatgacttccgtgacagagtcagtcattttatccacggtggcatccaggaagaactgagccatctgcatagtgatgagattccgtacagacaagaccttctggcagattgttgccgcctcatagaagatccgactactctcggcaggcacgctgttgctaatctgtcggaaaaatagcgcctggcagattacggcctgtacagtggctggatggttgttgctcaatatttggcggtacagggatgtctgaacctcatgaatggaccgaagcaacgaagtcgccttgcttgcccacaaagtcatctccaggagtggcacagagggggtcgcagggagaacagatcggaaactcttgcttgcgatattgatttcttggttgttcgtgcatttgaatgcaatcttcgcatagcctgtccagtaacgaagcgcaaaatccaataagggatgtttcctcaacaagtcttccgtcacctgcccattcagcggctccaaggatggcccatggctatcagtcacagtttgctttgcgtacagtaggagtctctgtgcaaaatccacatgcctgtccttgatcgcgggtagaaatttgcccttcgagaatacatcgaggatagcggtccgcaccagtgcgtgtctaagatagacaaggtttttgtggaagaaaaccaaggaagcgaccggcttcaatagctgagggaagtcaatttcgcgatgctcggcgagggccgcctcgtcaggcttggtggagagaagagcagccagttcctgctgggcgaggggacggttcgcagtgactagccagaccaaaatcttcttcgtatcctcgcttagcttggactgtaaggtgtgggatatcagatccgagatcttatgtcctgcctggacgatattttccaccgacttggaaagcgcggcctcgttcggcgggttctcatcgcgcacacgcttggccgccagcttcgcccaaaggaaagagccatccgatgcttccacaatccgagcaacggtcacctccttgtcttcgttggacattttgctatacacatggctctgttgaagggttttgcgggtcaccgcgctaatgtcatcgaagattaagcctagggtgactcgcactaccatttgggaggtgaccgagtccactgggtgggagccgagtgtgatcaactttaaactgggggacttggatgccgcttcatgaagccggtgtgacagggccttctccccacagctggcctcgtccacgccgtcgacgactaggactagctctctggaacctgctccactagtcttgagagcacggcccagggcatcccataggagattttcatacaactcttcgtccacagtcaaccggctctggttgtaagcctccgccaagatttgatatagctgcatgttgccaatgcgcttgctcaacatctgcgacatgatcgtcttggcgacggctcccggggtggtattggcagggattcgaccatctatctcggctcgttagagagtaaaagttttgggttgaggacaatgaaactaaccgatagatgccaatatggacatataccttgttcctcctacgggatactgcagataatcattgatcacagttgacaaaaccgtcttgccggaacccgacttagaggtgatagaaaggacctgcttttcgcctttcaagaatcgcatcaggtatggcttcacccacgtgcaagtggcctcctcgcgctcctggcccgagggggccgtggcttcggtgatatgggcaaccactgggtcttcgggctgcaaccagtctttcagggtattgattccgacggctagatttatataataagtatagatcacatggctttgggggagcgagtctacctttatctccctcgaggccctctcggatcaattgatgacgccacataaggtctgaaatgtgctcacaacgaccacgaaaactgtcaatcggacctgggaaggtactatagatatcaatcgatacccattccgaggcaaggagtgaccgatgaaagtgcgtggccacacagacgacgagagtaaccagatcagctaacgcaagaatgagctggtctttgatatctgaagagaccacaaagagctctgcacgatcgagcaggttgcctagaccagaagagcagcgatagaaaaatccaaataggtccataagggccggagcattttcctcgcccaactgtacgcttgtggtcagtcaatccgatttagtgggcacgaggatgtggcttctgctcacctcaagcaagctcgcacagtatccataggataactgggcggcgaggtggctgtcgccggcaaattgttcaatcgctaaatcaaacgaatgcacacgctcaatgaacagggccgcccacacaagggcattgtcgtagccactcccctcgggcggtaactttctcatcctctcgcaccgaatccactccaacaggctagcatagtcagtatcggacacccgagaggccgataggtcatcgctgccccgacgcgcaagcgagttgactacatctgcgagtgtggtgttcttagtggtttgctggtattgatgactgaaactcttctccctggctacggtcgcgtgctgctctgccatgttcgaagtgggtcgcagaccgagtagcgaagtggaggacaaagatatgccatggggcactgaagccatgtctgtgtgcatcaaatatgatagaaattatgataataattaggctcggttggatcctaaggaagacattatatgtcccggtttagggaggaagctcctcttccttgtactcttgttctctccccctctctcccatgatgctgtactgctgtaccatgttgtgattgtgctgcaaagtccaagacgtcaatataagctccaaccgatcataatcgcagagccaaaacaagagtacagcatgtctatggagatagtatctattttcgccactaataatggcatcatttagttcccgccgtggtctctgtatggatcagatcactcggtgcctttcgtgtaatgaaatcataaacaggcaagaaaacaagcagaacaggtatgtagccgaaccctcaaggggttaaggtttccgggccgatcctagcaaaaccaaatgtgtcattgcattcgctgagaacggttcttccacggttattgctagacggttgcaattgataacataagaacaaccatggatccatctacgggtgtgatgtaggatagatgcggggaagctgcgcacttttcagaaccagatccatcggcatctccatgggccttgcgccgccaaatctaaatcattaactaccagggattgtatgtcgtaggtttaagatggcacacaattaaataaaaatgaggtgaagatgacgctgtagtgggccacaacccaacccagatagcccaatttgaatgaaatgactttagtcgaaacatggaattgccgcactatatctcccttgtggccttccaaaccccggacactaagagtcccacggggaattaaggttgcattgatatgcggggacggcattcatctgtccccacatcccgctctgccgctatgatctcattctcattatctacatctcgggacagatgctgaataaccatgggaccgtcccaaaaatagttgtcaaccagacgatcattaggattccgccgcggttcgcttgattgtgacttctagtacttccgcgtcttgaggcaagtcggccccatcgtcattgttgtcgaaatataatctccacagatcctggctattctccacaccaaccacctcagatatcttctcgtcgtccggaacccgcacggccagccaaccttcccagccctctagtgtgatccgctcttcatcttgtgtccaatcgaaagggccacatatgtttccttcgctatcctgtttccctccccatcgtagctcatgggtctgcaaatcaacataaacccaacgtagagttggaggcgtttcgcctgtgatggtcacaaaccccgatgtgttatcaggggggaaatccggatgttggtagaaggaaccatttagtgggacaagctgtgaatcggtagatttggtgatgtacatctagattgtggtcagtgataggcagactcgatttcggccagcgcatatgcaagggataataaaatataaatcaatcggtcgtatgggaactgacgtgcctttttatccgcgcccaagtatactctcgcattatgaattgccaggctttggggcagtaatccatttgagggcatgcattggactgaaaggtaacagcgctcttgacgcgcactttcccgcctgcgctcttcatggtcccgcgtacccttggaagcctcgttgactccaatgatggttgggaccatcgcggtcatcaggaaaatgccaaataccatcttagttcaaggtattatgcagtggcttcgtttagtatgaacattggttgtactcgtaagttgtttctggcctttcgacgaagtttccagcaatgtactctagctagctatgccttgcacatactgtggcaagatggcttctaaagccgtcgatctatttgacgtaaggaagaattgatcaaagtttatcttttttgattcatagcggcaacaattcccgctaccctacaccaggacctagtcgtcaacgagaggttaaggttctcattctgcaaacggctgattgtgtcctaggagttgaagaaaccatggatatgtgaccatatcatgctttcaatatctctagggttcagaaaattagttcatagactaatactgatgagtgtcattgactctctgccttcttaccatgaagggtaccatgaggagatatatatcgcaggggctttctcctcaaaaaattactacgcaagtaataatcaagaacaattattactacagcctaagcagtaagttttatgctcaaaatattcaaccttttaacgcatggttcaacaacgaatttcgaatttctgatgtttttctccagttcttaccctgtggaagcaaattacgagaaaatatgggagaccctgtcccagcgttaaggtatatcaaatcccagtttatactttataccctcatactactattttctatgcaacaacaccctcgtttaccggtcccggaggctaaccaggcattcaaacggtgcagtgccgcccctgcccttggtaaaggaaagcgtaggggccgcgagggatcagaaacctcatcttcgaccaatgacccaattgaggatctggtggaacctgacactctggctaatggaattcccctgattggacctggcgccgcccgtgaacttgacagaagaagaaaagatgacaacgaagtgaagaaggacaatgataagggtagcctgaacatcaaaatccacctggacttgcatgccaaggtgaagttggatttggaggctgacatatatggagatattgtgattgggctactgtgatggagagcgttgcgggttgttgttacttatcaatgcgttagttaattacatggtggatataccgccactaggcaatttcaactgtgaatctcgatcacaggacttcttccataatctttgatcgtactttttaagaaggaaagccacaacgaaggtgggcgtctatgtttatcctcttgctagtttgactgtgaagtgcaatatgtatgatcctataaatgcctgattctacaggcttgtttgctagtttgcttgctagctccagcaacctaaagaccgccgaagagaactcaaatataggaagagctctgcaagctcggctacaacggcagtgcatcagtgaggcatgatttaaatcctctaagtgcacatttcgggctatatatcgaaacaattggtcgcttggttggtagaagttggcgaactgtgagttggagtaagttattacagatagggcattcggatatgagaagagaaatgtatgtagtgaagaggggaccctgccacaggggacaggggcaccgacagccttgtctgcaaaacaggtgtgagagcagagacgacgagcgcaacgatcggtaacttaccgcgtataattgcggagcgaagcaaagcaattaaatcataacctcgtgtgcattccacgtgaccaggtcttttcattggttttaatgcggtgaagaagtagccggctaactttggcagaataacccaaccggcagaataaatagctagggagtggtcaaataccaccaagacctttttaggatatgccatggagcatttttagtctagcggtattgacaaagcaacgctgaaaagggggcttcccttctcgaactcaagttattgaactagacctgcaacacgatatacatactttatcctgcaaaatggtaacatctaacaaatcctgtgactggtgctcgacagataggacaggtctctggtgatttgagatttcctgcgcataaatcgcagaccatatgtccacatagaattgtcacccagcggtctggctgcatatgatgatgtatcgaccacttcaatacctaggtgattgaattaccttggaagagggacttttggcggcgattgggcaagaaaagatcacttccaaatggcgtacaaagcttgatctcacccggggctctttcttggattcttccctttacgtgaatcacaggctcacacaacaccaatcagccatcccgacggtaccgagtaccacttcaaatctccacgatggcgtcccaacacattcgggtagccacgccgccctccagagacgccatcctcgaatccctcgtcgaaaatgtccgcgccttcaatgcgcgtctaccgccaggacgcgacaagatcgtctttggcgcgtgcgagctcgaggcggaatgccgctgcttctcaaccggcctggcacgcccctcccgtgtagggagcagcccgccgagtttgagaccgtcaacggccacttttcagcccaaatgcacgctttcttcaacgcactgcacgacctcgaggacatggcagacaaaccgtcctcggacgacctagacctctgccgcccagacgaatgccttcggcccgtcatatgcgtttctaaccagtccgaaccctatctagactgcttgcaccgcaccttctacactcgctgtcttaccgtccagaacccggacagcctgccctgcctcaaacgcgtcactcacgctcaactgcgcatcctccccgaccgggatcctacctttcacctaatcaacatacggcctgtctccttacgtatacctctcgacctcgctacctacctccctcaactccgcgagctggcctgcccctggctataggagtgccttcccgttgcccttatatctaaggtactgtgtataatttcccgtgtctgggtaagtccttggcgcgatgaccgcgctgagtttgcgtgggctatacgttatactatacccttatggccgtcctcccttactaaggtctatctctggttctggagacctagctcctattagcacgaggtagactaagtaacgtagatacctaaccttactggtatattatcattgtcctcgactaacgagtttaaaggtatgaaccttatgtctcttagcgtttgcctcgtctctgcaacgggaaaatatgcccgccctttgagacgctgagctatttacgtggcttaggtggcggccctccaaggagagggcgaaggagtatgaagggagtgataacgtgcctccaacttcgtatgaggaggagatggttatgcgatggggggtgagatacgaggcgcctgccgttggaggagatgggaaggggaaagtgacatggcaggtcggtgaggactggaggccggaggacggagtcatcaaggcgtttgaggaccttgtggggggagacggggagaacatggagtggaaagcgtttgagtctttggaagaaagggagcaggatccggaggactgttaggaaagaatctcagccattcaacccaaatgacccccctccctcgaatcgtccattctaccgacattttcgatcggcactcgcggtcagagaatcgtgagttcgatccgagcctccctattagcgcctcaacaagagagaacttcggttctcaaacagataagtctcagaccgtggattcaaatatcctccggcatgaacgaacagccagcgatggggacgatctgtgcgactctaatagcccataaggaagggagaatatccgttaccaggtcaaaaatttcccgacaaatagtatcgtccgccccctttgttcaaataaacacaaacaaggaccagcaggcttagagatcatccaatacaatccaaactatatatgcagtgcatcagggagaagaacatatggaggggagacgcgagatagatggctatctaaactggaacaattccttgcgaaaatcccgtctctagaaagttggacttatgatcaagggctgtctcgtgatcaagttttgggtctgagatgcagaaaagtacttggaatagcggatcatactcatacatcgatttgtcaggacacggaagcctggtcacgacgacttgaaggggatagcattattccagttttgcaccatgatcgcgatctcactatgaatgtgagcgaacaagaagagagctatcacaaagttgcatgctttccagagctcatctttatgtcattgtgtgcggctgcgtcccagacaagtgagaatacagccagtgtttacgaagcgatgcgcttatacaagaacacaaatcctcgggaaaagcactcgaagaagcttatacgtggcgcaatttgggcaaatcgctcgatcttcgctttagcagagactacatggggcccggagtgctcgaatgcattcttatttggcaagtataatatttcagatttggcttttatgcaagagctaatcgcttcaagccggagaatctgtctcctcctttgcccgatacgcggagtatgtcaaaaagcggcaagaggtgagcactaaaacggaaagagaaaggtctcgagtgccaggcattatccggtacatatgcgtatgcgtgtgtttaattaacgagaaggaagaaaactccaagcagatttgcgatgaaaaggacaactggttttgatcaggtgatactgttttgtatggcttcaaatgttcagaccaagacaagcaactggacagaaaacgataccgagccatgggtgatatatgaaaaaagcagcacgccgggacaccttgatgcgaatatgttcgttctcttcgttctcttcgttctcttcattcttctcggttctcctagtcaaatcctcaagctcggttcaatagccagcagtcataacccccatcccatgatccagcaagctgctcgaagcaacatagctaaacccaccgaaaggattactctcagcagcgaagtcgtcgtcatccgcgccctttccagctgggaaatcctgtcccttactatagtactcatcaaagccgccggcagtgaccgtcgggctaagcgggagatgggtgaaatcagcggagaagttctcggcgagtgcggggtccgtgacgataggctggataggcgggtcgagctcgcggcgctcaagagcagcccagtcgattttgcggaagaagcggtgcttcttgattatctgcaggtccttctgcatgtggtagccgaggcgcttggagggttctttgcggagtagacgggtaagaaggtcctttgcgtcgggccccaggaagtaggggagcgtgagcttttgtttgacaatcttctcttgtaactttgcgtggttgtttccgcggaacggaggtgagccggtgaggaggtcgtagcccagtgcgccgagggaccaccagtcgcatgcttttccgtacggcttgccttggatcacttctggcgccatgtagtcgattgtgccgaggagagagttgcagcggtcgtcgtcgctaagcgcgatcttgctgagcccgaaatcggttaggaggaggtggccttgcgagtctaggaggcagttctcgggcttcaggtcgcggtagagaacgccgacgttctggtgtaggtgtgctagtgcaagtaccatctctgccatatagaaggctgccgtatcttcttcgaacatgcgttccatggctaggtggtggaagagttcgccgccttgcgcgtactccaggatcaagtaaagcttctcgtggtcttggaatgcatagaatagcttgacgacaaaggggtggcggttgacactttccaggattgtgcgctccgtcttggtctgctcgactagctttttgtgaacagtgagggaggccttccggaattgtttctgagcgtagagcttgcccgtgacgacgtggcgcaccagtaacacagttccgaatgagcccttgcctagacaaaggagaggcacaaagtcctccgctgtcatcttgcggcacagttgactacgcaactccgcagtcatacctgggacatccgccttgcgatcgtccagtatctctggttgaacagcgtcggaactaacaaagtcctgatccagagggatttcatagctagtcaagatttcagtgtggtcgctatcggagtaaaaactggcaacactgggggtcttggagacaagtccgcccaggccagctgtgtcgtcagacagactcaaagtgttaagttgaagcttcaacgcgctgaccccatggcctgtggatgcctgtatcagtgggctagcgccgccaagcgcagttggagggcaagagggagcacgtgagctcgcggcggaaaagtccgattcctcgtcgccggatgccagaggggtgaaaccgcgaacagttgcgcacgccggcccgaattggttcttcttcttcttccgtttttgcttcggcaacatgttctcattgagagtctggtttgtatatccattgaatcccttggttgtctgctctggaggtgatatgcccatgtgtgcattatggcgacggtgattggctgggatgtcaatggcggactgttcgctgtcggcttgcggagcgaacacgtccccgaccgaccagtcgtcagaaggcattatgcttttgctataatagctccgcgagggaagcgaaataatttaggcgaaagcgccggcaataaccgcagggtcaataattgaccttgcgcggttgtaaagaacggtagcaaggtattcagaatacctattttgcagtcgctgttcacatagagaaacccggttagcctcgatcgtctcaatcttagatatcaactgtaaagaatgaatagacgggtgggtgagggttttcacgcccccactaattatcgccaaggtaaaagtaaaaataacaaaaataaaataaaatcggaaatgaaaggccgatcaaggagacgtacttcaacttgcggaatttattcaccaaagcacggttttgcttcaatgtccgaactagtcaatagaccagcctcgaatctctcgagcaggtttaccgtccgcccttcttcaggacggacctaggacccctagccaagtcacctcgctggccgaaaagtcgaaggccaaggtgaaagcagaaagcgctgggtttgtcgcgttcgagatgtcaggaggcgagtttagaagggatggatatagatcaaggttggctagggagccagtaagcgaaatcaaagcgagcgaagacgaaggtacagataggcacatagaggacgaggattttggtaaatagagattaacagtctttcttccccgggaagtgaaacaaagcaagaaaagagcgagatcgtgcagaaattcggatttcgcgcagatccgggggctaagcgactagtcccaatttggatttcacgtgtcagatgctgacattagcatgatcttattggatttatatgttggtattgtcttgatatgtcttgatattacagtctttttactttgactagccctcgatatcttgccaagtgagacaagcctcaatattacagccaccaactcgcatgactgtcgatctcgcatgactgtcgatctgcatactgcagcctcctgtgtaacatgaaccccttcacagccctaacggctattgaagaaatccttcgagcgagtaatctccacaccagaccgctggacaaaagcaagagcacttggcttttccaccttaaccgtcacatgctcattgccaaagtcgacagtcacaatgcgagcaatgaaagtggccaaagactccacagactggaaatcagtctgatcaaccttctataatatcaaaatatgtcagcaaataagaccccagaaaaatataccaacaaatgcccagagagatagaaccatacctcagccacagcccgcgtcacagcctggtaagtatcaacaacagccgacccccaagcaagctgcccaggaccctggaacgtaagaccaacaaccacagcctgtttctccagcctctcatgaggattcacaccgaggatagcatagcacctaataccctcgatgcggaactcctcctcgagaaccaccaaatcgcgcgcctccccaccagcaccctccttcccgagcgcaataaccccccgataccggagcccctcatccgcgcgcaacaaagccttaggcaaatgcagcagcacttcgcactccccatacgccgccgagatagggttcggctgcttctccgccgtagcagccgacgtcgtctccaacagacctagtccggcgtccgcgacaacgcccgcgaccacgcgcagatcctggcctaggccgcggctatgcatgtcctcacggcgcgtcccctccagactgatcaatcgctgcgacgggtgcgatgcggacgaggtgtttacgcccatgttgcgcacgtcgctttctagtcggcggaagagcttgccatagtcgagggttagggagacgttgtcggtttccgcggctgtgattattgaggagtaggagagcttgagggttgcagtgcagggttgtgattttccctggcggtgccaggcttctggggcacaggggagggggagctcgatgtcgcggagacggacgctgtcgagcacatctgggcggggtgggagttggatgggtcggtcggtcatgattgtatttgtcttggtggtttaaggaggagatggttaatgcgaaattatcaacaatattaattagatcaagggaaactgagaggggaggtttttttttggcggggcacccgtggatggttgtagatcatgacggtagaatccacacgggcatttccgttttatttgtcgcagaatcatagattagatggagactatcggtagtattatgggatattgtttgtatttttgttcactacacgtgctagaattggtttggtggagattgtgataatatatatctggtaatatatatctgggtttaacatggctccgtacccaaatttagatactaggacgttacgaatcgagaacccggaatattacaacaggagaaaccaaccaactaaaggaaaagattaagattttcggatgctaacacacatacgatagtccggggctaacaagacagaccaatagcgataaccgcctagcctccagccaccctaaagctaccagggaagaaagaaaagattgagcactcgcgctgtccagtcgtcaggaagaaagaaaagcacccggccgcaagaacgctgaacggaacctcggcaggtgaaaaagaatcatgacaccatgaaatcagtacgagacgttgcgggtatttggcgaaggaggtcaacaaaaaaatgatggtagaacggaagaatatgcaataaatccaatcaacgaagacccggcgccatctaccagtagcgaggacggtcgtaaggcacatactcgcctcttggtggagagcgaggacgaccataaccccgggcagctaggtagggatcatcatagtggcgagggggtgggggaggccgggcctcgtaggggtcttcgtagggacgacgtgggggtgggtagtcttccatccgagggcgagggggagtccggcgggcatagccatcccgttcatagtagggatcgcggcggataggaatcggcgaccgctcacggtagtgctcccgcggactgtagccacgtgggggagggatccggcggtcgtactcctccatgggggcagggtaggggcgacgtggtggggaacgggaccggtatgggtcacgaacggggcgttcctcaaagttctgaatctgggatttggtgagagggggttcctctaggtccgagccaggttggacgcttacatcggcgacacaagatacgacggagcccttgaactctcgctggtccagtttctccacggcggtcttcaggtcgttggcggtttcaaattccacaaaccttgttcaaatgtcaatggattggaagggtctcggaatacaatggttcacccaccctctgccctgttctcggccagtttcagagtaaacaacgtccagtccagactggcgggcgaagtctttcaagtcctattgaatgcatggtgagtccaggtccaggaaaggtatgtccggtaaatgtggtgagagaaaatgtaagcactcccatgtccagtccgagggggtgtatccagaatggccatcttatatatccaaaagtcccaagaaaggttccatgggtctgacaaggtgtggtgagtatgcaaggattaaggagcaattcttaaatctcaaggtaaaagaaaaagctatagaagcatttctcggttatcaagagaggaatgataatggattagtactcgatccttggctcaaccgatggccacaaggacaatggactggaagcatgtgtgggctgaatagagacgggtttgaggaatatacgtcaggaactccgggaaggaatggacttgctgctaacctgccaacttgtttctggaagaccggaaatctgcatgcggaacatagtgcgacgtggacgagggagcgcgttgcggtcaggcggtcccgggaaggcttccttgcgacgaggcccgcgcgcaaactgaacggtgagtcgctcgcctttgaagtcactgccgtctgtagtatggataagcgaggggtcattgggtggaaagtcatgggggggggcatacggaaggctataagaaaataatgttagcgactttgcgcgatgaagggaatctgataagccattcttaccgggcacaatatctctggcatccagctggtcgtcgtattcgatgaagccgaaaccgttcatcaatttgatctccgtaatcttaccggagccatggctgctgaaatgttcctcgatgtcgcttttggtcactgtgataataaagcagaaagaggttagcgcatcatttctccaaagtgactccaaaagcaccggttaggtggccacccgaggcgctgttccatgtgggtagcattccacatgagcatacgagaggtcagagcacatgggactcagaggatcagcgaagcgaccagattatgcacggtggtgcgtgtgttctccaaaactcagggaagagggacagtcaggtaccagcataccattgcggggaagattcccaagataaaggcgggttgaggatacctcagtcatggctagtctgaagcgattgatgagcgaggatagaagggaacctggctaaggcgaatcctagagaatatggatgagatcgaaaaggcgggagagcagagagaagttgtcagttgcggtctcgctgcaggaaagcgtgtaacgtgtaacccgacaaacgagagacgggtagagggtagatgtactgctgcaaagtcaaacggctgaacagcagaacagcaaaacaaatacaaaagataccgaagcgaagagcgagaggggaagaaaagaagaaagtaccgtctggcggtggacagagggtggccgcctcactttttctgatccacgtggttccaccatagtaaaaatagaggaagagagaatatgaaacagtgattactatatagagcgattaattagattacatgtactagctacaatacaaatatatacctccatagtttaaaggaagtaaggcttatccctcgtggactctctccactgtcattccacggttctgccaaccccatggggtctttttttggttaacctgtttttcctatttgaaacatctatatgtacatttggttctcgaaatccaaccattctatattaaagcccctggttactatcatgggatcacgtcatgacgtacttgggcccctctccaccttgaggagtcacccagttaatgtcttgtgtgggcaccttgatatcacaagtcttgcagtgaatgcagctggtagatagttagtatacctctctatccccacgataattcaaatcgagaaacttacttttgtgagttgatctggaatcggaccccgtactttttgctagggtcctccacgtattcgtagacgcctgcaggacagaaccggttttcaatacccttgtaaaccggccatgagaggtccgtatgtttatccatgtccttcacctgcaggtgaaccggttcgtcttcctcatgattggttccagtccggctgacactggtcaggatatcgaaactgatcactccgtctggcttggggtaaacgatcttctcgtattcagaagcaggcctggtagctgctgcatcagtgccgtggtggctgagcgtccagggcacccggcccttgaacaggtaggcctccagaccggagtagagaagtcctccgaagaagccgaaaggggtgttgaatgagggccggatgttccggacctcggaaagttccttccaaatggatgaatcccgtagagatttctcgtagtcaaacaagaagacggtgccttggctctcacccttaagcgccgagtaggcagcctcggcggctaacatgccggatttcattgcggtgtgggtacccttgattttcgggacgttcaaaaagccggccgtgtcaccaatcaaggcacctccggggaatgcgcacttcgggatcgactggaatccaccctcgttcagtgctcgggccgcgtaagaaatgcacttgccgccctcgagaacctccttgaacatggggtggtgtttcaacttctggaattctccatacggcgaaagccatgggttcgggtagtccaatcctgtcaccagaccgatactcaccatgttatcgccaaagtggtacatccaggctccaccataggtatccttgggaagagggtatcccatcgagtgggtaatctcgcctgatcggaacttctcgggctgaatctcccagatctccttgattccaagaccatatgtctggggctggcagtctcgtcgaagatcgaatttcttcatcacctgcttggtcaagctgccgtggcaaccctcagcaagaagcgtgatgcgggcatggaactccattcctctctcaaatgtctccttgggcttgccctcccgagtgagtcctaggtcgttggtcgcaatgcccttgacggagccatctgtgtgatagaccacctcgctggctgcgaacccagcgtacacctccacaccaacctcttccgcacgctctcccagccacttggtcagctcgctcagactgataatatagtttccctcgttgtgcatctggggcggggtgggcagcgggtacgagccagtcttcgtcaggaagcgcatcttgtcgcctttcgcgggagtcgcaccctggaagcgcgaagggttgtcctcggccagccagtcgggaagcagctcattaagagcggtcggttgcagaacgtttccggagacaatatgggcgccaatttcaccggccttctctagtagaacaacgcggaactcatcgttgcctgcctcgttggcaagttgcttcaagcgaatcgcggcggcgagaccggcgggacctgcaaaccaaagcttggttaggatatatacttggagaaccaatgtggcaaaaaatcacataccaccgccaacaatgcacacatccacgtcatcggactccctgtctaatgtgcgaggatcgaagtcgccattctcgtcggtgaagcgctttgacagcgattgcgaaaaggctcgtgtctgggttggcgcggtgaatagtggtgttcgccgagctaaacgtcgcccagaaagtgtgaagggactggctgtgtgcgctggcgtagcaatggagacggaggaggtagctcgtgcgaagcgggaggatcgaagttcacgcctcaatagaggcaagacggcaccttttgatgccatggcggtgtaaatggttcaaagatcggaggctgagacctggattactttgcgaccagtaattgagctgatgcggggactcaggatatttacgtcgtagatcccgagtgtctccagtacccgagttctgagtggaagtgacaaaaacgccgaaaaaccgcctggctaccctcggctcacttctttcagccaataagcagctgggcgattatccaacttccaggcctgaggcagccatggatggatgccaccgcccgaagtgggaatcgccactagccgacgccgacgaactggtaggagctgggcggtttctttagtatatttagaataatatgcactggctcaactcttatcacatttatgcgccgcggcttgactgaacttggagcccctggcggtatcctagtatatttacggagaagtataagtagtctgcaatgcccaattctcgtcacgtttaggcgcccatgttcaatacgatatagatactctgagttgatcacatgcatcacatgcttagcttccttcacttgtgatagtgaaacggaacaatattggcattagctctagacttattgaaattgcatacatatctatatgccagaaacaagcttaaatacccgagtcatactgtcaaagcagaatgcagtttcccgtattccgtattattactacatttcgcggaatgtgacgattatgccgcttcgggtatggtattcagcatactataccataccataccagcataccggaatccgctagaaaatgtaaaaaaacatgtgacctgagagttgagaataacaaagtctcaagaactgagttggtatctgtatgttgtatgttgtatgttgtagatgaaaatagattgcagggagattccaagaagttaaaaaaaagaccgatcatcgttagattgctcgcagattgctcgccatgagattcatccagccttggcagacagtggatcaacgccgcgggcgtcaaaacggccacctgtcctgatcgaaatctctagggagagtcattgatatgaaaccaaaaaaagtactccgtatagtcggatcaaatataatttccgagcgatataagctcctatcacagtcagtttccaacaagatccggtataatgaggcgattatagtgaatccccagtgtagtgaggtcagagagtaggggaggaaacaaggcaaaaaaatcagaatttttgttcagttgccatccgttaaagcggcaagaggatagcgcgtcgtacatggagtgaccgaggttagtcgatgacgatgattggactggcatgggacggatggactatcagctgcaggaggagcgcggactggcaaactcagacctgtaacccatggcgccgcggaggataaagcaagggtgtttgagccagtcaggggccgatacagagagattggcggagtgcgctgggcgaatgaaagtgaccaacgatgttgtgcttctgtgattggctcacagggtggtttcccagagccgctagcgggctctgaagccaaggttgaagggaccaaagtgccgctgctttaaccgccaccggtggcccagcctcccctgactaggctgtgactcagcactatataaagacccaacctccccccaatttaccgtgggaattttgtctcggtcttggcggatcttatttcggaaatccttcttccctccgctcctctcaaaaagcctcttgattatcaaattgatcttgatatctgctggctttctcttactaatcagatctatctcacccagatctttgattttcgagacccttgattttatcaaagggaaaaaaggtttcttggtccacagacctaaacgtccatagaagtcgagcctcaggcatcacttcaccactctctctttttcagatcgtgcagatagacaatcccattttccaaaaaacagggcaaaacattttcgaaagaaacaaaaaaaaaagtgccgtccttccgtccataatatcgccgtcgcgcctatcttgagaaaaacactttagtgtgatttttttctcgattcgttcaccatcgactgcgttgggtttcgttgcatatactatcccgtggctgtgattcacgagaggttacgtgcgaacacctcgtagggggatacattgagttgtccatctcccaggtaagaagctccttctgtttgtgtttgacgttgtgccttcctttttcttccttccgcgttctttccctcgacacaccttccctattgatacgttctcgggaatctttccttgttgatattttctcttctcctcacgtgttcttcttctctccgctgctctgtcacgcgtcgttttttatctcgcgacttttcgcgactcgagctgacagatcttcttgatcagttccatctttattcttgtcacaactcgagtattccatcatggattctctcaccacccacccctccaatgcgcagcaggctcgtgccttcactgccacctcgtcgctgtctttccctggtggtgctggggatttgaccccgcctaactccgacaaggaggccttggcaatggcacagggcggaaatggtatgaatggccagcaggccggagcaaatgccatccatggcaccggggtgactcccgcttcccctgcgacccccgccgcgacccctggcgccactactggaagcagtggcattgtccctaccttgcagtgagtatactctggacgtttttctgggtgaccagaatggctgaactagttattccaaaaggaacatcgttgctactgtcaaccttgactgccgtctcgatctgaagactatcgcgctgcacgcgcgtaacgccgagtacaacccaaaggtatttattattcctaacattgctctgagagcgcacgcatcagggtacaatgtggctgaacttggttctctccttagcgttttgctgccgtgatcatgcgtatccgtgaacccaagactaccgctctcatcttcgcctccggcaagatggtcgtcactggtgccaagtccgaggatgattccaagctggcctcgcgcaagtatgcgcgtattatccagaagcttggtttcaacgccaagtttaccgatttcaagatccagaatatcgtcggctcctgcgacatcaagttccccatccgtttggagggactggcctctcgtcaccacaacttcagctcctacgagcctgagctgttccctggtttgatctatcgcatgatgaagcccaagatcgttctcctgattttcgtcagcggcaagattgtcctgactggtgctaaagtccgcgaggagatctaccaggctttcgagctgatctaccctgtactttctggtatgtcttgctggattcgctgccaaacctttactgacttccttcttagatttccgcaaggtttagaaagttccagggaagatcactctatgcgtttcaaacctgtattaacattgctttttccctttatgaggacagtcgtctgaggtctgtccgtatctcgcttttccttcggttattacgactcttttcatgcaagcatagttgggcgtttttagcgattcggatgatccccggttttctcacactttcgcgttcttccacacaattagattgctgcacaccgcagtgaggcggttgtgcgccggtcgatgactgcctcgatttaatcatttatcgttctacaatctgtggaggattttattcccacgggccaaaaaaattaatggtgacctaaggcagtctgttagactcagctccgtccttgttttcccctccggggttgatggaccggctttttgccgtgatactaccttttgagtagtcaatgcaaatgtcttaaaaaagaattcctctcgtactcgagtagatgtagtttgtagctcaagccttgatctgtttatagtctaaatgcctttctttatacatccaatgtctatgctatatacatctcatggaaggatacttccggtctagagcacactgctccgcgaagccttccttgtcttcgccaactcgtctttcagaatcggtctcctatccccagatcgactaccatcgccatcaaagtcctcatcattcgacacagcaacctcgggccaagtccacatcttgcttaactcggaatcaagcgtgccctccagcgcatccacaaccttgtctccaataacagggaagaacttaaacgcgtggccgctaccaccggtagcaaggaaaagaccttcatggtcagggtgataagaaacaatgaagtcacccgtgggcctgttcaacaaaattagcacccagtccacagacaactaaaagaccaaactcacgtatcagtataccaacaaaccctcgtattaacaaactccctctccgcaaaacgcggcaacagctgcctcaaggcaacgcggaacgcatcctgtccttcaagcggcacaggtaccccattctcaggcagactaaccaccatcgagccctctccagcaccgggaaccggcacctcaacgggattgcgatacccaaacgcatggcgcgcaatcttgagcagattatctcggggcgggataataaagatgcccgtcgcgaagttcaaaatcgtcggcaaattctccagctcgcgctgctcctcatccgagatgcgcatataagcaatcgcctgtccggtcgcaacagcccggccgcgcaagtccaccagcttcgacgtccacgcgccagtcgccagcaccaccagatccgcctcgagggtcgaaccatccgccaagacaacaccggtggccttaggcttggcaccggtcgtgtcatagagcacacgctcgacatcaccagtgcggaagatcaccttcccctcagcgtcgaggacgcccttggcatagcgcacgctggccgcggcgtcagaccacccagacccccagttcacgtagccgccggcgacatcgagcgtcgagccgtaggccgggacgacgctgagcacgtccgcttgcgtcggcaggaaggtgacgttgtcgccgagctggcgcacgttggcgtagctcttgcgggcgtactccttcgcgctggcgctgttctctgggtacacgaggagcaggccgttctgcgtgtagcggccgtcgcggccccagtctgtgctacgccagcgctcgatggcggctgcggcgagcttggagtaggccgtgttggcgtagtccgcccgcacgatccgtgatgtgtccacagaggatccgtgcgggtttgggattgtcggtgaggactctacgactgttacttgggattctgggtgtcgctttgacagggagagggcggtggatactgggaaatgttagctgtgtgggaattgatatcaaatgcgtagtgtagtgtgatagtgtagagtgctataggttctattattgttcacacttacatccaaacacgccccctccgacaatcagaatcttcgacggcaatgccatttgcaaaaatatgtgtgtttgtgggttaaacaccagaattggagatcaggagatggatttctccaattgatagataacacgccgataacggcattgctcgtcggctcagctcccgacttttctttcctggtcgatatcgtttctccgatctatacggaatgagatgtgcgactgagctcgggatttgattttgatccgttcggttttcatttcttctgcctctaactttcctttggtctcgcgggctgacaaccctgtcgcgtaagcactcaatcttcgcgtcaaaccatatatgcacaacaggctacacaaccctcggcagtccattctgctagttcaaaacatcgtaatgaacgtaaatcaattgcgccgagtgccattaattgcaaagtggcccgtcacaccccgccgcagcgcatcaagcaaagcacctcgacccaagccgaggcatgtaaccagaaccattcaatctcaaccccaaactgacaccctgcagtccccaaaaatccaaaccagtggcgataaaacggcgtcaaccaaccccgcctcgccaacatcaccccgagcgcccatcctcacagcccgaaacccccgatgccgcaacagcaaaaccaagccatggcatcccacccagagccctaaccttcctgggcatctccgcactcaccatcagcacatactgcggctacctgtacgcgtcgtacacgcgtgaagtaagcaaagcgcaaactctcgacgtaccgcgcgatgtctcagaccgctacaacacaacagcggcgaccttcgacgcagacgtcgagctctccgaaaaggcaatgggactcggcaagaagcggcgagatctagtgcgccaggcgcgcgggaacgtgctcgaggtcagctgcggcacggggcgcaatctgccgtattatgagctcggcgagcggcgcgggttggatgccgatgggcacgcggccgtgctgggttgtcgctcggttacgtttgttgatcttagtccgcagatggtggctattacgaaggagaagtttgagaaattgcatcctgcgttcccggcggtgtttcgcgcttgtgatgcggggaaggttgagccggctgatatcgggcgtgctgggaagatgcaagcgccggtttactttgataccgttgtgcagactatggggctttgctcgatgccggatcccgttgctacgctgcggcatctcggcacggttaccgagcctgtgagggggcggatcttgttgctggagcatgggcgttcgtattatgattgggttaatcggattttggataatcttgcgccgtctcatgcggatcgtcatggctgttggtggaaccgggatattggggagattgttcgtgagagtgggttggagattgtggaggagaagcgttggcatctggggactacgtggcgttatgtgttgagaccgaagcagagtgagaagcctcagtcttgatatggtgtggcttggctggagctatgtaacataatttggaaatgtgtatgaatatttggcgtgataggaatggattcagaatagactatagaattcaagtgatgagcaagaacttatctcggaaattggcctcatccatattcatccctctgtccttaataacgatatctgaagccgggcgtcttccaatccgtgacatcctcatagtcattcgataccaattgcacccggttcaccatatccgccacattattcgaatcgtcagcgtccaaccccttcccaccaacagcacccgagtttccagcactaccctcaaagccctccagacgcacacggcgagcattagaccactgcaagtagaagcgcagcaccaacgccaatacgaccgccagggcatagcaaatcatgatcgtgcggaaggccgtgttataagtcggggcctcctcactaaggaagaactgaggtccagagatatttccagcgcagtaagccaggaagagcattgcagtgactgtcattttcttagtgacaccacgataattagcctggaccagcgacatggcaagcggcattgcggccggaccagtcgacaagaggaaatatccaaagaattgcacgcccaggacgatatgcgcgcgggagtagataatggcactgccgacgacgcaagggatcacaacggccacgataagcaggcagttcagttggcggaaacgaccggccagccagcccgttccggtgattgtggccacggtgatgagcgagtaagggatggtgagcagcgtggattgcaagtttgtgaagccgaacgagacaatcactagattggcaaagttctgcgttcctccgttggggatctgggtgcaaagctccagtccgaatataagccacgtctttggatccatcaggcattcgacgacttggtcccatctccatgcggtcttctctgttgcacctgtgcctgcaatgacgactcggttgtttgcaaactggcgttcctcttccgagaggaatttagccttggagattgagtctggtagtagagcccagacagcgaatccccagaggaatgtcgcgcagccgaggacgatgaacatccacctccatggcccgacgttatccttgacgtgacctagtccgtaggcgaggagactggaaataataccaccgacactctgtaaagatgagcttttattcaatatattgacaggaacaacatacgtttccggcgaaccataggcctgtcctagtagggatctcgtcacgcgtgtaccacgtcgacgtgataaacataaacgccggcgtgatggttgcttcagcgactccaagcaagaagcgaactgtaatgagaccgccaaagttggtgcaggctgcagtgagggccaccacagcaccccagaatagcgtgttggccgtcaagtatttggcagcgggcagacgggtaatcagcaaggttgttggatatacccagcccaggtagccaaagtagaagattgatgatacccagctgtactgttggccaaccaagccctaaaaatgatattagttgtggttcttgtttgttctggacatgttcttacagtatcgtccctcatcccgaagacagatgcgctggacaagatggttttatccatgaaattaaacatataagtcgtgaaaagcagtggtaccagtcgtctgtcaatcttcctcaggactcttttcgccatagcgtggtcgggggtaattgtttccatggccatttttagtgaaaagaaagggaatactggatctcaagacatttgaacacttgaactcttcttattgaaaagttcatattcccctgttatctttccccgcaccggtaatttgtccaacctatacttgttatcgccgtgatcgggcgccaattggacgaggatgaagccaagtcctttagggctagagctagtagctagtatggacgatcttttcggagctcttcttctactccgaacccaactctgaatttgacatcttgccaactacttactccgaacttgtattgatttcgccgatagtgagaaccacttcagcagtaatcatgaacggcctcacaatcaccccgttcatagccaatcttcccaaggtcgaactccatgttcacattgaaggcactttaacaccctcactccggtgggagctatcccaccgcaacaatattcccctcccgtacgccaccttctcagacctgcaagcctcctacgcagtaaccctcaaccaccgacctgagctcaatggccgccaacctggtatcccaacctttctggaagcctatttcgccgggtgcgaagttttgcgcgcagaaaccgacttctatgatttagccatggcctacctgcgccgatgcgcagccatgaatgtgcgctacaccgagccctttttcgacatccaggcgcacacacgtcgcggcatccccgcagaagctgtcctggacggatatctgcgcgcgcaacacgacggtgccgctcagctgggcgtgcattcgcgctggatcatgtgtttcttacgcgacgagcctgtgcagcagggtctagatgcataccgcgaggcgcggccgtgggctgctggaactgttgagggcggaaagggcctgtttcatgctgttgggttagcgagtaatgcgtacgagaggccgccgatgcttttcgaggaggggtttgcgttggcgcgcgcggatggcttgcatgttactatgcattgtgattttgggcagaaggatacgcgggagcatgtagcgcaggctatttttgaggtctgtgggggaaaaggggcggagaggattgatcatgggttggatgcggaggattgtgaggtgttgtggcaggggttggtggataggcggattgggctgactttgtgtccgcatgcttatcatcgaaggacggcgacggaggttttgtttccgaagattcggaggttggtggagaggggggtgaagatttgtattaatagtgatgatccgactttgatgcatgatgtctggattgatgggaatctgcagaaggtctatacttattgtgggtttagtcggggagagatggtgcagctggcgaggaatgcggtggatatgtgttgggctgaggaggacatcaaaagggctatctatcaggaattagttggtgttgatatttgtgaataactttcctaggagggttgacttccccccaaacgagatcctgacacggaatgttccagatgactttttcgaaggcaaactgagtaccttgtttgtttgataattgtgagaacagcaggtcatgtggcagtcttacccctcttctattcaacttagtccttcatcctcttcgactttcatccttcttgatacctgatagttacatcccatcaacactcatggctcggcctctgaggatgatttcaccggccatccactgatgatatattctgtcatctctatacaatcatgatgtgaactcgctcagctactgctgatttccacgggagactctgaggtccgggttttccacactcaccttcaactcgggctctctctctctctctatatatacggtgggtcttatcatcaccctaacctcttcccttgataactgctaatctacgaaggcaaggatatggaactatctttcaacctacacaataccaaaacaggggtcgtcaaatgagagccagccggactccaacaacaagcagaaaacgaacagaaggccagctatatcaatagctatatagaggttcgcagaccaggccccaagcaccaagacctgtctcaacagagaaccttgagcatatactatggcttggaaggaatcgtatccagcgccttgtctcaatatacaggtgcgaagacttgggaaatgctccctatctctttcctcgaatcggatcgtggacattcggtatcccgcagggcagtggctagcctagccgctttttttacaccctcatctcttctttgaccacgagtttggacctggtttctatactaccccctcactcaaatatatcttggaatacgatggcctagatggtgtgattttgattttcaatatctttcgctcgcaaaacatgatgcgggggttcgaaccgaatcttcgactatacattcaagctggaaacaacccaaagacatcttgtacatgctttcaaagagagcatgagaaagacatcaaagtcgcgtggctacttccagagttgcctgattctacaatatagtaacggcagcggcccaagagaagctggtgcagaactacgaatcttccatggcaaccccttccgaggagcgcagaatctgttaataatgctggaccggaattgaccggtcttgtggttcgatcaagtgatatatgatcgagcgattccttgaagcgaacatcggagttgactaaaagaaccgaagagcactcttcctgaccttctgccacggactctcaaaccaccaccttctcctagataatggtaatgattgaagggtctgggtatccttactttgaaaggcatccttgagtgcttgtcgacattacgctcgcgtcaactgtgtttatttcggccgagttatgggtgagcctgctcctagtgagccaacgtgaacgaagtatgcaagactgagctgagccatcgtcaaccgaggaaatatgagtgtgcctgctgttactgagccggctctgaatgaatcggacctgacttggcagaccaagaccatgctgttcagagcctgcggaccggtattcgttcactcgatatgtttcttgcgacgcgggcggcagggagtcaggctcatcctagcatcatggcttttccttggaaccacacacatgttagtatcaagactgacttacatcactccaccctcagaatttgtctgggaaatgctatgtacgttctatgtgttatcctatccttctagaaagtggcgctaactctttcacttcaaaatagttacccgaaatcatcagggtatcgccgaaaatccgtcatctcacctccgagaacagcttattctatcttctttcgaccgtaagacacattggttttcgcgacgaatcaagtgtcagctctgtgttgacacctggaaacacaatggtttctaacaaagatggggaaccgtatcatacagagcagccatgagatgtgtggttcagggtcctgcttgactttccaactctccaagtaggacccaatcacactattggtagtgaaatacggagtactccgtataccaggtggattttataggaaggctagagccatgggccaacttcaagccgatgtgctgtcgtcttgtactcgccaaacccatattggagccacacaaccattgattatgaccatgagtggccagggtgcagacaattcggtcttgcggtcttggaagtggctatgcagaaaatagaggaattggggtggttggtgttgaagattgcttttgaggcgattctaaatagacatatcctaccttataagttatccatgattacaagctcaataacaacacagcatatctccaacacaagacccggtatggaacctggtatgtgctcataatcataaagcggcacccgatcgggagatccccgacggcctagaatcgaatagagcgacagacaacatatgttgcgtggactagtacggagtagccacccggcagtttgtcggcgtggattggctgatgcggcatatcgaacctgtcccgcattcaaaacgggttttcgccaccaatccccatcattgattctcatgcaaggcgcagatcttttgcaggggctgttggatgcattctttgtttgcagttcggtcgtggtgtggcgggaaagttggaaccgaggatagtgagtttaggtaaggtttggatagatgcatcgattctcgaggggtggtttcattggttgtttagattgagatagcatatctgatacacgcaagctatctacaataatatgatatacttttgaatgcatagctggtagataatgtaaacataaggagtacgctagttaaaggggaagtggacattgtaggtacctgcggttgtggaggtgcggagaattcccgtgcgtctgcatggacattgtaggtaatatgtcctgcctgtaaagaacattggcagaattcgacatttaatgcgatcagataaactagttcactaaggcaattgttccctttcggggtgacaatggccagttcccatggttgacgatcccgatcccctaggcccaagtggtcgatgtcatgaaaacggagatcagagcaatgccccactatgtatgtgctttctacaatatatgtacggagtacatgcacagatcgcaggggtaccttcaagaatgatatcttgatacgcagtacgtattaccgagacctacagcacctgggcagcaatgcttgtcagtaatatatacatcccttgctggataagagattgggcgatgatgtacaatatacgacgtactttttgggtacttttaggtacttttgcaataatatcccaactgatcatcatcatagagatgtggatgagggctccgaaggatgtcatatgcacgtaggagtatacaagtgttatattctttccccgatggcaccacttttcagaggcaactgcggcaagattggctttggatatttataatttcccccaaacgatagatctcaatatatggtagctgacagtgagatatacaaaaacaaggtctcggattttacatcatcggtggcaaacgttccttttctccccgagacgctaatgtgagcatcccttactagcgtcatgtacaatacgatacaccgactctgattgatcgttgtcccgtcgattgggtccctggggtccaccgagaagtggagcccggtggactttaagtggccactccatatcttttttttttcttttccgtttcttttccttttctatttgtaacggccgcgctagagagcgcttttgggtctcggtgtttccgaccggagggttcggcttaaagccttgtctttttttcctggtcaaaaccgacggactggacgtgttgatggtggttttggaatttgatgtcgtgtgtgtccatgctcaattggtatacttgcataattagtttgttgtacaactccataagttaataataactatattttgatctatcaacagcggtgtgtttctggctcccccagcaaccaacaggtgacagatcaaataatctcccttaccagtctcctccgtacatatcccatgcagtaggaaggctccgagttcaacaagaccattatccaccgtgcaactaccaatcactggatcggtaggtcttattattcctcaaagcatcggcttgtgattagcgggctccgatgtaatgcgggatgggctaaccactagagttgttgggtgaacggagacgccaagggccatggagcaccaaaattggacttagtcgggtcgtagaacacatggatgccccacccagctgtttcggtatgcactaagaccgaagatagaagggaaagaactatggattcgcatactaaggcccgaagaggaatggggtgatccgcactgcctggggattgttccctttttgcctgtgcgtgtcgcatgtcgtatgttgcattattctggcgtggatatagcggtgaggcgtgtagagtggtgttgaagctaggtgggatatatagtgctaagtacaatatactcccgagtctacgctgtagataggcatatgcgcatgtacaagtacagacattcttaaagaatcgaaaaggaaaaagaaaaacaagccccagaccagccaatcatcgctagactatttcgggaggctataataccgtacggtaatttacgccgccaatttttctcaattttcgccaatttccacttttcccaattcctcaggcccccggtaatttgccatacaaacacgctctgcctgtcgcatcttgatgatcccccccatttatccttctcatccccctttctactaacatcccccatatcttagaatcgtttttattattatccttcttattactctgtttattattatattctcttcgattatatcctgtgttttatcgtgattcttgattcttctgctctactccctcacaatgccgtacaacactcgtcgcaagtcactatccctcccgtccttgggaattcacctcccaaattccactcgtcgttctccctctatctcaaaagtccacagcgatgagcaacccacaaaaaaagtcaagagatcgcacggtgcttcattatcacctgaaccctccgacaagatgatgcgcgctggccgacgtggactctttgagtttacaccgcccccttcgccgatggatggagtgcttgcgcccaagatcgatacagaaggaattaacgacgacatcgttatcgctgtaatcaaccaattagagaagactggcaatcgccctcatctggtgaaagaattggccgcagtcctggtcacactaaatgtcaatgtcgcgaagtatgtatccactctaggcttcctcaaaacacgatcgctaacatctcctctcctagttccgccaatcccgctgcgctgctctcgtcgcgcttagctgcctatatgaagcgtccttggaccgccctctcgccatgtccgatggccaaggagcttattttaattcatccgcgcaaagtgtactactatcttactacgtttccccaccaacccattccggagaccgacgatctggtatctgccgtgggtagtaagcacctcacacccagtgtgtccagtctcgaggatgaggaagacgcgatggtgcgggaacgtagccccagtcccgaagtggacttgtcgtcccccgacttcgaggagcatggtgatttgaacccctcggctagccatggcggttcttctaatcacttctccaccgctagtaatttgacgcgtcttatgaactcgcaccgtgccgcttctccgcccctggagggtgacgagaaggaattcacacaaactgccagcgccgtgcgtgagcgtgcatccgaggaaaaagccgagtcgagccgtagccagtccatcctgtccgagagcctgagcgccttggaggaccgcgatacgcgcatgtctgaatcgcctatgaatggtggttccatgtctccgtctctgcctggcgacggtatgtccgaagaagagtacagtgactacttctcgcacatgcccatcgaccaaatggcccaggatctggacgaggctgccgcgactgccctgtttggcacctccccctctccttccctcacctctatcgcatcgtctgtctcgtctggcacgagcgcattgacagatatgggtgtggatggcgaggagcttgccggcgctctggttgccccccagatcagcctccccgaagatcccgatgcggcccctgtttcgtccctcaagcgctcgcttgatatgttgaacagcggcctcccagatgtcgacctgaagatgtcggatctaacggaatcgcacgagaggctcacccttacccctcgcgctatctctatgaactcggagcctgtcttcgagtcctggagagaattgcagaacccggagatggtggaagtcgacgagctcgacgagatgtttggcgaattctaaactatcctcgacctgagtccatttatcccgtttatggttccgctcttctcctccttctctccactcctagccgggctgtgtcccgtcatgttctctttacctcttttacgtcgcttgtacatgctcattgttttctcggcgcaactttcggcgcacccttttacttttcttatcgctaatgcctattttccttgtatatatacatttgttttggactatctaccctggaagggtagattgggaggatattcacgactggagaaatggctttacccaaaagtgtcaaaaatactagcgtttcttctcataaattcatcttttctcatcttcatccatggttgtagttgcaaaagagacaacggttcctgactaagcagtgcccaatcaggaaggcgggcagcctatcatccatgggcagcagcctagagcccacccgtgggccgctttaacagaatccgccactcgactcggctttgtactgtattttctttcttccgcgggacattcgtacctcgaaagacgggtctcaaatttcccttatacatacatctcctttcccgacctcccatatgcaaattcagccctatcatctgtcacaactttatatacatagcgccgcaggaacccaatatcgccaaccatactctcgccaacgtaaggacttctgcgacaatgacggccggagaaccttcgcatacggacaaagacggcgccgttcctccacgcgagacgtccaccaagcaaccaacagcggacatcgcgcctgccggactacgccctctctccatcgcaaatactatgtcaacaataggcgccaagagaaccaatccgggccaggcttccttgagcaagacaattgccgcatcacaaactaaagttgccattccgcgtcaacgggtcgccgctgccccgcgctataatcggcgtgtgccgcgtgcttgttcgtcttgcaggcagcgcaagacgaaatgcagtggtgatacgccgatttgtcgtcagtgtcgtgaattgagggctacgtgtagctacccggacggttggagggagaagacgaaaaagtatgtataagtgtatctgtggctacgcgagccagtatgctgactagctggttacagacaagttgaagccctgtcggaaaaagcgcaagaatatgaaaatttgctgaaggaattgaggggtatggttgagtttagtgccgcagagcggatcagaagcttgctggacaaggtttgttcttcttttgggttatcggagtgttgctaacactcgtaactatagtatggtccggaggtggatggttcttcgcaatcccaatcccgatctcaatcagcaaccccgcaagatgacattccagaaaacgatgaaccatcctcgccttcgtctattgggtctcttgaggcgattgatcgagtggaagaggatatcaatcgatcaccacatgcaagagcaactggttatatggggaaaaactcggaaatcacctggatgcaacggctacagagagaggcagaccaacgtgctcaaggtcttccggggagtttggagtttggccaggaccccaagattgataatgcagtggctttgcatgcggtcaattatcatcttgacgacttggatatttccgtgcctgaaccggtacagctgtatgccatgcctcctcgagaggtcgcggatcatatgttcgaggcttatttaaccactgtgcatccgttctttcccatcatcaacaaacctcttttctcagcacagtaccggacgttctttgacagcgctgctcgacccggtgacaagtggcttgctatattgaacatgatattcgcaattggagctaaacatggccacctcatcgccgcaccatggcgtgggaccgagaaggaccatttaatatacctaactagagccaggatacttagtatgaacggtgatgtcctgttcagccatcccgatctccaacaagtccaagtggagggcttgattgcattctaccttctcgcttctgatcaaatcaaccggtgggttaagaacttcctctcattaactaaattgagtccaccataacacttaatagggcgtggagaatctcggccttggcagtgcggtctgcaatcacacttggaatcaacatgaaaagcagcagtccagccacacctgatctttcgaaagaagcccgttaccgagtctggtggtgtctgtacacatttgagcacctactcgggataatgaccggtcgctcaacttgtatccgggacggagtgtgcacctcgccattcccgattccatttgaagaagaacagctgcaaatgcccgaagccgtcgaagtactcacagatgcggcactacgagacgaacggatcaacaacgtcatggcaagttcgcgtatcagacaaatgccgctccacccggtaaatggtaaagatgctagtcaccacactcgagcaaaaaacactgaatgggtcaaaaacctacctatcaactacgggctctgtcatctctactattgcgacttgacagtcgtcgtgcaagaaatcgtcaataaagtctattcagtagactgcgtcatggtgccatgggcccagatcgagcaacggattagtgaactcaagtcccgaaccgacatctggaaatccagccttccaaccgggcttgactttacacgcaaggatgataacgggccagatatccttcgctgcaaaatcagcttagcgttgcattactacagtgcgcgaatcacactaggtcgtccctgtctttgccggcgcgacgcgcgccgaaggggcgcgcacccctccttcagtcacgaaatggcagtgataaccctacactctgcacggcacatgctggatctagttccagatgagccagatgccatccagctataccgcatcgctccctggtggtgcatcctccactacctcatgcaagcaacgaccgtcctcctcctcgagctctccttcggcactgtccacatgcccgaagaagaaaacaacttcgtcgccctgtccaagaaggcgatccgttggctcttcgccatgtccgagcagagcattgcctcccgccgcgcctggcaactctgcgacctcagcctccgcaaactagcccagggcatgaagtacgacgtcagtgacatgccttcctacccatacaccccagagcctaaaagcactatcagcccggagccgctagctggccagtctgtatctcaagctgatggcgactactggggcccacaactagaacatctccccgtgtctgttccggagggaccgcctcgcgaagaccacgacacctcgaccgcagagctgatgacttcgttgacggccgatgcccaggactcgtacttcccctatgatcctatctccggggagtttatgcgctctttctttcctaattctaattctaatgagaatgagaatgataattgggaactttgaatattgcatattgcatacaattgtcgcccatactcacttcacgattgttttgtgtatgaaaaagaaaaaaagctacagaataacatgtaagaacatgagaagagtatgcgagctcgcatctctctcttttttccactgacttgcccacttattatataccccaatccatcgccctatatccaacacgtccctatcctcagcagtatacttaggaactatttttaacatattaacatccctatccctatacctatcctacttatttcttgtttcttccttaccgatattcatcacttcttgcataaggaactgcttgctctctattaggaattagtgcagtgaagcacagaagagagcggcagttcttcacgattgaaacatttccgtatgtgatacccatctctttttttctccatttcataagcctttctccctttatctaccgcgaatatctttctgcattacagatattttcacaatgggttggcaaaagtgatatctcatgattgatattgattggggctgtgcccactctagagctggacttagaacgggggcttgaaagggttgagattgccatcagactagaacttttgatactaaattcattcacattcatttgtcagcttattcattaatgcaatcagcacatcgtagagtaaatatccaatccgaagaaccgtcctggctcaatgacacagccttctcaagaagtccaagtgagaaaaaaaaaatagtatatacattcgagaatagtttttactttgaagataaaaatacatatagctaggacccataagcaaagaatcagcctagatattggggttatcataaggccacttcggctccggctcctccgccggcggcaaagactccgccaattccttcggccagtgagatctcatgaacggatcggatcggttgtacttgatccgcatcctgacgggcctgcgcgtgggggaagaaaagacctttcggagctgcatgcggcgcatgtggccggggatctcgatgtcgacttggtcttctgggagaccgaatttcaggaaggtctcgagacagaagtctaggatggactcgagctcggtttggggcatcttgccggactttaattgataggggtattccttgcgggagatggagggtgtatatgaagcggcgcggtcgtagatgaaggaggaggaagtggtgttattcgggtcggtcttggtcttggatttactgggacggccgtggggttgttcgtcagtggcttgtttcacgcactctgcatattctcggacggcacttcgtgcgagaatgcggacagtgttgaggtctgctatcgtggctttgcttcggacatggttgacgtaatctgcgtcccagcctggggaaccgtgtgcattggcccgttcatcactgaacagcagccgggcaacaccacctggagattggagctggcgcttgggagatacccagtcgacacagactttatcccagagctgcttgccgacgatagcgccctgcgtttcgacgacggcagcgaagatctcgtggaaggtggctgggggaatcaaagtggccttgtggtgtccggtgatttccttgggtggctccacttgtttgaggatgtccgggagaggacctgggatgagggagagcacgcggtgcatacgagagagtgttcgaagctggaagttcctgactttctcacgagtagtattagcatgccactcgccgcggaaaatgcggagcaaaatgtccgtggcctgattcaggtcttctgtgtctgccggagtcaaggtgccggcggatgtcctatgtttaacggtggcatcgagccgaattattgcacttgccagtacgccaatattgacgtaaccccaagatttagctcggtgctcggtcaagaagttgagcatcagcaccacgcgcttccaatcttttcgtgtgatactgaaattgatcaacgatttgatggtgttcacagaaagagggatcgcgagtgacgcgatgacgcgctcgccaagctcgacgttagcagtggcagctgcaaatcgaagaatagatggcgccagggcctggttcccatatgcgcgttgagggatagcagggccatcgatgtcattttccaggagtagttgctggccaaaatcaaacgcgtgggttgtagtcgccacgtcaaggagattggcaaaagtggggcatgacaactgcggaatagacgattgagagatatcatgaggttcaaaagacttgaaatcaaacaacagagaggcttcttcgtcgctggcttggctcacccgttcaaaaaacctttggatgtgctgtgccttgcttgcatcggaaatattttgaagccaagcatactcgtggaaaaggcgtccgctttgcttgtcccgagcgtaataattgagattgaactcgattaggccagtcatagcggccgattcatcataaaactgcgcccgcgttttcccatccaacacttgtgccaagctcaactcgttcccttcccacggaggaacaacattgttctgggaccttaggagatcctcgaaggcaacaggatcagaggacggttttaaacagcccgaggccaatatccgtacaatgtgccaattggtgaacctgttcgttggccgaagctcctcacgggtggacaaggcaggatcaataagtttagtcagaggggctgataaatttgtgagatcctcaggaagatatccacgatctcccattccgacataggccttgttcgccaagccgctccgcagtgatgcaaccacctcagagctgatagttcggaatccaagtccattgaatggttctttgtcctggcccttgagtattgggggtttctcattttggcctggccgacgccatgattgctcgatactgacattggttttttgtactgtagcaaggtcatttataagaggcgcccaactctcagccttccattcgataagccgggtcatttgatgtacgagtagtgtgcccgttctgcaaaaaccatgctccacacaacaccatagaatgagctcaagccaaatctcaggacctagctctcgaattcccggtgtgtaaggaacgaaaggtgacagcttccctgcatcagcggctgcagcagccactgcgacttcatgttcatgccacgccgcgtcagacaaaacgctcattatgggaccggacaaaaaatggagccctggtgggcggaacacaatctggctggcatctggcttcggatattgataaactctatcggagatcatgcctgcatggtgtaaacgggcaagagttcggtatacgcaggacattgcatgctttgaatcatctgaccgactgcgtgtagcatacaaaaccaaagagccgaggtttgcgagtacttcagccagaattctctccccaaagaatctcggtgcaggttccaccgttagcgtatcaagagaaatgttgtctgacggaaggggttcgagacgagaccatttccaaggggatgatgattttgtgcctcccgtgagcttgctgagagagaccttcgaggtaatgggagacaccaagtcggatgttgactcatctctgcggcgcacacgatatggtctattccaatcaagcccagccgaagggtgcttaggaggcatatgagcagctaacaactcataggtgtctatcaggctatttaaaagagcctgcacattagaccactcatggtgtgcaaatcccagatgcgcgatgagttgaaattcaaaatgaatccttccatcccatagacaccccagtagagcatgggtccgatcaagctcatgttcggattcgcggagtggtcgaagccgcctaggctggccagcaggttgggcgacgtctggtggtttggtagtttttggtggaatacaatccctcagcactggcatccattcctcgatgtgtctcttctggtcatgccggaggtgagggtgtttgattaaattgtatcgacgtagaaaaagaacttcatctgggaaattaatctccctttggtcattgcgagttttgcgggtgtattgtgtccaagtcggtcgggagaaaggagacacggatcgatatgggataaacggtaggcgtgaagcagttggcctgcgaccgaatggcaggatgcggccggggcgcaagcacctgctcatggtaccgcaacgaggcttaaaggcgggtgtataggtttcgcgatctcgatgggtacgggattggcgtgatacatgtcgatttcacaggtacatagcggtatattcacgagattcaattgaaccccataccaacaggggcaaatgacgaccagagatgggaggtgaggtaaatgttgtttcgagaattttggagatcaggaactgctgagtcatcaccgagctatgaaccaatcggaggccacagaatgcggagtttttgacaatataagaccctacattggaactataagggaattctctcctagaatattcagatctggattagatgatatgtagaatcagtatattttctgctaagtgagctctgattcacgcgatatccgatgcctgagcaccgagggcgcgactgctacgaatacggctatctaaagaacgccattactatcaacatctacccacattgttactggtcgagagcctttatccactccaaagttcttcccgaagcttagaatttaggatttccacggcatattggcatgaaaaatatctctcaaattcgatattgtttgtgctgtttgtgcatgccctaaagtacaatgaaatgttgccatggagcttcgatctaggtttccgggcccgttccaatcacatgcatacaagaccatccgctaaggctagcttctacttttctacttttgtgatggttatgttatttgctcacaactttaccgttttactacttactctacatagcactcgggaaaagactccaagatagcaacaatatcttctctatgctgatccagcagcgacgagaaacacggtaatgatctatctcacatgccatgcgagcgaaactgcaaagcacgaaatctagtacaacatctgacgggcatgatgacgagcaaagtctccctgctcaccagcaggaagggcagtcacggtcgcgataggcagagtggtgaaggaaccgctagaggactggctgcctgagaagccacccgggaatccaaggggggcaccggtagactcggggaatccagaaggctcgagcgcaggggtactggaaggagcgccggtgggcttggatccatgaccgtgtccttcgtggccaggtccgtgaccagctgctcggcgatcaaaggaaaatccagtaggccatccagtgggccatccagtcgggatgtcacttggagtgccagttggggttccggatggagttccgggtgggaaaccgccagggaagccaccaggaggagaaccggtaggagtagcagcggaggtcttgtcggcgtgctggcgagaatatgtcaataaagcacgagatctatgaggatctatagtgtagatactcacaggcaacttccaggctacgacagacggggccaagaatagggcggcaatgccaaaggtagcagtgaatttcatgataaagtgttgagttattggacaattcaaagtgaaagtggaaaatgaatggatgctaccggtagcaatgtaaagaaagacctgaattgagaagaatgaaggtgcacagcactgtagttgaaaagaaatcaccgagaacaggaaggtctagctggttatataccccttgcgtttcactgttgagagtcaaaatgatagattgagccgttaaaaggtcatcaaaagaccgccaaaagagtatgtgttccgcgagaggagtgggatctgcaggggaccaggtctcatcccgtggcgaaataattcaagcaggagtgatcttcatagatacaaaaataacgctatcacccggagtgtagcatattgtagtggaaccaggaactacggcacaaatagtggatggaacgcatattgtgcggagcaggttgtttcagacaaaaagaccccgataaaacgggcgaatgatagttctccaccttgttctgcacatcagctcctgtcgatcacttatgtgtctgatgaaggaggtgtgtcctgtttagatggagattggtggagccctaaaggcggcaagcccgcgaaggtctagaaacatacactacgcaacattaccagaaagaatctaacttgtgggatttcttttttcctgagcgtatattgtatgatcgctcatttacggagaattagtgctgtaataagtctgatgtgagcatgcccataaatcctcatgttatgctttattccttgtgtctagaacaagttatatagtttaggtcgtttttataggacactttatagagttaacagactagattgtggaggtacttagttatatacttatagtgccatgcactggtcaaagcttacatactacgcgaataatacctaactccatgtggtctagggcctacgcttcaagcttttgttgtaacttattcaatccgttgtggcagatgctctcaattctatgtaaaatttccgaaaagctgccctcgatttccaaatctggatgtctttacctttgaatgatcgactaaggcgttaaaccaaggcaaaaccaactcgaaaaagcactcacaggtccgccatttacaactagaatatgaggacatgtaaaaaagagaaatgtccaattctggcactagagacagccgtctttccaactcgtagttatctattctgccccgactagcactgttagtcatcctcctgtggccattaattatggaacctgaccgaccaaagccaaccatatcggtccaaaatccggtttcctctgtttcacctcgaaaatgctaccgtcaaggctaggtggatcaagcccttgacccctataagggaaatagcacagtccaacagtgtacatccgccacgagtcccaaatgacaagccccaggcggcgccagggcctgaagtgccttaagcccaatgaacctgtttgagagaccatcgcgtttatcatttggaagtactggacatgaatttgtctttgtgaacgccattcgggtgtaagctaccaccgtgttgatgttgttgcttcattatcggggggtataggcggcggagaccagatagacatggacttactagagggcagattgaaagagtcgaagaaaggaattggtgttttctcggggaattcccaggcagcgtgggaggactcgggtccctacgtgtccattatgaaccactgagatctcactcctcggcgtagtgccatagaagggagtaaggcctaggtctgaaagaaggacggcaatcgtccagatcagctcgttgtttcctctatgtatctcattccagacattgtatgcgtctaggtcctgtattgattgtgtatgccaattccagcttcccgttgcagatttgcgaagggccgaatagtgttggagatgaaagagagactagtacgtgcggtattcttcaatccatgagaagggattccgccctttttctgcgcgctcagctccgctcagagagccgactggtatttcactgagggtagaagcaaagttctgctgcataagcggtagacaagcacaggcaaggcgctgtattccggcagctaggtggatgatgccgattgatgccctgtaatccagatttagtgtgtactcggccatgtgtgagaataggtttccgaggacgggcttcaccgctggcaccgagagcgcgactagagttccagcgatctcggcgctctcgacgcacagcatcggactgtaggcccagctgccgtcggagtcccattgacctgcggctacgagccaaacgcggattgcggagatcacgataacgccgtgacctcatatgcttgttggctgtgggcaaaatctgtgtaatgcgagatatgaacaaggctgatgttgtagcatattctctgtatctccggaaaaccggtaatagggtttgccagtaagagggaatgtataatggagggttgagtccggaagagagcgtggacttgagaggatacggatgtgaggttttctatagcggcaaaatcggcgatatgaatgaggatttgttggttcagttctgcgggtagttaagcgaatgggtccatggtggatgaaatattagcagtgaagtgtgtgaaaatgagaaagacaaaattgggaggtagttccttaagtactactcacctaccctgtgttgtctccgccaagcccaggctaattctcaaccacgcactataaggcactgtagaacacttgatatcgtacttcattgtttgaagacattaaattaccagcgtaaaaggaccagcgatcatggacagaccagtcaacgcttgtttgtaactatacatctgttcacaccttcattcccgtcatgcgcccttataattgccaatataaaatagaagatgcttttcggcgaagccactcttgtttgtggtcttaaacacacgcacctaggttggaaccttcactcccagctcgggtttgtgctggataagcatatatgcgaccccaaccccgttggcagtccgcagaagtgccttgccttcatcactttccatgctgaaggtcgtgcctggccattctttagcgacactccccgcggcctcatcaatgatcctcaaggtatccggattctggacatttttccgaataaagtacttaagattcttgattttgttactccccgcggccaacttctgccattgaagaaaatagacgttcgatagcttgtatggcgagagcaaggggccggtgtcgacctcatgcatgacaacaagtagcatgctacacgtcagctgtgacgtgtcagccagcacaaccaccaccggggctaacgtctgccacctgatagactgggatgaggaccagggagacagcagcaagaacagacctagcgacaatcccgatccaaagccaacttccaccacttccaaaaccacctcaacatccccagccactacaatagccacaggcaaacccgtcccatcgggcctgtcttcatcccgcgacgacatccaacttgtcatcttcgattccaacaagataacaagcgacggctcaacatggcattgggccggatacctcctccccagccttggctacgacgacgaggacgtctgcaacgagaaatacgaagtcatctcagacccccacgtcgaagacaaccaagcttggcctttctccatgggcccctttaatgctccaggtttagattactgcttcttccacaaattcgcggaccccctctcccccaagtaacccgggctttatctcctgtaacaaccatgcctatctgacgtggtgcatagggcttgacgggaaacatgcggtgaggaagccggcgcatacatgtaccgggaatggcggaaagaagaccgagttctggcttcaggcttggtgcagtttgaaggggtagaaatagctagttgccgccattatgcagatggcctagtttcagctagggtaccggactttgcatacaaatacctagtaagtgggagaagtagaagaatggaaaatgagacgaagggaggacgagcggcgaagacggggtcttttatgttgaaagacatattacaaaaaagaaagaaagaaagaaagaaagtaacccataccaaaagaatatatgcaatgcgcgtcctaaactgatcccggggtattgtacatgaaaccaacacaatcaaattgaaagccaaatcgtcaaatcgtcaagtgacttcaaagctcctcctcaagaacttcttcttcgccaagctcttgttccacttcgtcgacgacaaagctctcgtagtcttcaagacctttttgaacatgtactttgaagcgaatcacgtcattaagcatcgtttcgacgttagtatgcaactcctctcggagggaatttgcccgaagcgtcagttgttcgtattcgatattggtgttcatctcgcgctgctccatcaattgaacactgtcgctgagcgtagcgcgcatctttgccaattccttctccattttctcaatttgggcatcggaggccagcttctgagtcgtcgtgatttcttttgttcgttcaaactcttcctctgctgcccggcgtcgatgctccaaagcctcgacctcgctccgtttctcatccattgcctctttaatgttgtcgagtagattgcgacggtcaaggtcatcatcgatcccttgcttccgtcgttcattgatctctttccggagggattgcaggctgtttcggacagagcctcgtagatccaaattgagcaaatgcgccgggtggtagccagtgaaaggctccgccaataagcgatccccctcgggagagattgggttggcagggccaccaatttggctcgcagagaaattgctctcattaatattcagggtaagctcataatcttggcccttggcgttctcagcagctgcgggaatcaagctagtctggtagccaagagtattataagccttcacgatctgttccagatcttccagtttctggctagcttccgcctccttctccatgacacggacatgggcctcttcaaggcgagctacggtatcttcgagattcttctgtagacgttctcgctccgagttcatgcggtcgatatcctgaatagtgatgccttggcgatcaacacttgcctgtagttcggaacgctcagattcagtggcctggagatcggtatcagttttctcgatctccgtgtcgaggaatttgatgcgagtctcgtatttttcgattttgcctttgacgttttgattataatcctcaaatttcctcttgtcatcctccaagatacggaagtgtttatccaacttggcaatgtcgggagcactcttctccacttcttcaatttgatcacgaagagcccggttctccgcctctagtgcctccagttcctgcacgtaccgttcgttgccaagagcaaattctcgcgacatgttttcaacgtgcgggattaaccgcttctcggcggtgtcatcatcctcgtcttcaccaccctgtagccaatcgtgatatgcttgagtgaggaaccggaaaataatgcgatcaccggtgacatcgacacccgcctcggcgcaggcatcatcatactcgcctgactgatagcgatccatcatctgtgccaattgcatcaaccaatgtagcattccgaggaaggtcgaccagttctggccaccaacggctgcgatttgtgacttcgtaatgcctttctcatatgggtatcttagctgttttaggattggcggtacttcggagtccatcgctttctgaaacttgtatcctggatcgatccgatgatatagccactggaagataaggttgaaatccttctgggtcggtgagcgaagagtgttctggcccaaggaatgtttcatttccaactcaaagccatgaatagtcaaatactccaacaattcctggccaatccgtgcctggaaagatcggtctctgagagggcgcgggtctctgggaaccccagccacgttgggaacttgagtgaagaacgattgatgtcccatcggccctcctcccgtggatggtcgcgaaaacacactacttctgcgctgtgggttttgaggcggtgcaggaatggaggaaagagaccctggcgcgtagctctgccgactggcactggctccattgaacatgttactcgacactgatcggcgaacagatgagagaccggcatcagcgccatatggtccaccaattgacatgcgtgtaaaatttggctgctgtgggcgactagtggagcccatcaatgaacttcggtggttctgagagctgaacggggggttttggaatccgatagagcttgcgcgcttcagtgccgattgcggttgagggatggcggagaaattttgaacactcccgagagtcttgatcgcaatataaattagcctcaagtcttgcgctagataggggggatctatacctctcgggggcgcttaatactgaaaagcccagtatcttgcgacatggtgataaacaagccgcgaaggcggcaataaacaaggcgattcttttgacaagtgttttttttttggattttgttgaatattgacaaatatccaacgtccaagtggattcaccacaaaatccaagaggaggggtttaatctgttgtttggcaggcacgaggcgggatttgggccggcgatgtaaacaaatgcatgccgcttctaaatgaagtaggcggtgtgtggacacaggaaaaacagtttagccgatgatcacgagactcccgtctggggaagtcttggcgttggcgcgagttccgaggtccaaatggcgattgccgatgtgagcgtcgcatctctccctaattcatcatttctgcacttgactggcagtctatatcattcataatggctccacgcgaggagctgattgcctcagctgtaagttgtctagtgacacaatgtctattaccatcgttcggggccacagctaactcatgcgtccgctagattacctgtatgggctacgaggcacacaacttgatgtgtaatgatagctgactttatctagtcctccaggatccgtccgttgcatcctcgcccattgaaaaaagagtctcatttctccaatctaagaacttgactcaagaggaagtgaacatcgccttatcgcgagtgggcgaagacccgtctgccgtggctgcagctacagcttcggcatcgtccccggcgcctagctactcttcacagccagttccttaccggcaaccacagcctccccaaggatatggctatcctccatataatcaatggcagccgcctcctgagtacgtttgactatcgattgtcgcatggtgttcgagactaatcacatgaaaaggccacccaagagagattggcgtgactggtttattatggcaacagtggtgggtggggttggttacgggttgtatactgtcacaaaggtatccagtggtcccctctcttaaattaatggcgctgatcaatctatccagcgatatatcgcacccttgatcgccccaccgactcctccgcagttggaacaagataaagaaaacattgacgagcagttctcacgtgcatttactctgatcgaacaattatccaccgacactgctgcattgaagaccgccgaggaagcccgtaccgagcgcttggatagggctctcaaggacgtagagagtctcgttgctgatctgaagaactcatctcgccgaagagatgatgagactcgtcgcattagtgacgaggtgaagtcattgaaggatgccattcccaaggcccttgagggtgcccgggaaggcaatgagaaccgactgaaggagctcggaaccgagctcaaaagcttgaagacccttctgggcaaccgacttggtggtggcggagctactcctgttgctggcaggacccttggatctactccattccctagcactcgcccggcaccggaagagacccccgccacttccactcctgctgccaccaacggtttggctgctactgtgactccagccgaacaggagccaactcaggcagctgccccagcaagcacaatccagagccccaaccccctctcgcagcttggtcggtctgccgcctccatcccggcatggcaaatggctgcggccaaccggtctaaggccacttcgcactcgagtgcacctgccacacctgctgaaaacaccgctagcccgagcctggagcagagcgctcctactagttaaagttgaactgggtttgctaaattattgaatgctgtatacctctcgacctagtgtatttatcacaatgaagggtttcccttgcatgagaaggtcgctccgtagtatagcattttctattccaatatgaatttgtagtcgaaatcaacgagattgggatgaagaaccttggaatgcgctagaatcgaaaacccggggactggccgaaccgataaggcgaccgtcttatcaccccagacgataatctcctccaaactttccagaaactctcaacttcagaagaaacagccaaaatgccttcgccaactcgctcatcgcaccgagctacctctccttctgcaccaagctcaagccgccatcaccgcagccgccacagccattcccaccgccatcggcatcgcgagagctcgcgctcgcgctctccgcaccgatcagacagacaccgatcagaccgtcaccaccgccatagcgaagacaaagaccgcaggcaccatgagcgacgacacagagacgctccagcgaaaccagtcgtgcttccttaccaagcgcgtgcgctatcagggcgcgacctgaaggtttatgaacccatgtttggcatgtacttggatatccaaaaaggaaaatatatcgaagacttgagtgaagatgaagtgaaagggcggtggaagagttttacgcaaaaatggtaggccgaaggtattctttgcttggcgcgatgattactgacatcgcaggaatcgtggagagctcgcagaaggatggtatgatcccgttacactagacaaagcacgtcagcatgcagaggaggaaccgacagctggcccaagaggcggacgcgaatcgcccgattatacgcagggccagcgagcgactggtgaaaccctacaggatccgccaataggcgatgacgatgatgaggaggatggggatgacgagtacgggcctagtctgccaaaagctggctcagggagaggtggcccccgagcgggccctgcaatcccaactatgcaagatctcgagctcaaaagaggtacgcttttctacttcccctaaatatggccagtgtgctgacctccaaccagaatctgctattgagaatgccatcgctgcccgcggagagtcacgcgatcaataccgtgctgaaatccgtacacataaatctacgatgcgccagatcgaagatgaaattgcaccgcgggctgagccaggcacacgggagagacagctcgagaagcgacgagaacttgcttcgagtaatcgtgcattcgcggacgcgcgtggtggttcgcccgaaggagctcctgatgaagacttaatgggcgcaggcaatgatttctctgccttgaaaaaggagaaggagaaagaccaacgtaaaaagaacgatcgtgagatccggagagaggagatccttcgtgcgcgtacagcggagcgagaagagcgtgcccaggcgtatcgacaaaaggagcaagagacgatgggcttcttgcaagctctggcaaagcagcgatttggttgaagataagaaatgtcgtgtgcacatgcgcctttgatcttaatatcctatagtcttcactcttaggtccataaagcaataataaatacgatttgcatgccatactctctcagtcgtccgctccagcggaacggtccgacaccgccgtcggagtgactccgaggtatctaggccatatatgatcttccctggataatacccagactactataaacccagcatgttcaaacaactatatcgcctaccatgccggtcaacattgacaccattagcacccggtagccggcggtatttccagaccaaaaggcaaaactccctaccagccgcatactaccgcggcggcacctcacgcgcagtcttcttcaagcaagaagacctacccccgaacaaggaagactgggctcccatattccgcagtgtcatcggtagtccagatcccaatggccgacagctagacggattggggggtggaatatccagcctctcaaaggtatgcgtagtcggtgcatcgacacacgacgaagccgatgtcgattacaccttcgtctcactcggtatcaaaaacaccgacgtcgactactccagtaattgcgggaacatgagttccgccgtcggccccttcgcagtcgatgcacatctgttcccattacaaaatcccagcccggattcagcctcggtacgcatccacaacaccaacaccggcaagatcattcattcgtccttccccgttgtcgacggcgaggctactgcgagcggtgattttgctatagacggtgtcgctggtacagctgcccgcatcaagctcgacttcatcgaccccgccggctcggtcacggggaaactcctgcctaccggaaacgtcgtcgatacctttgacgctaccaaagctacgtgcatcgacgtcgggaatccgtgtgtcttcgtgcaggcgctcgatctcggcgtgagtgggaatttgactcctgatgagatcactgctcatccggatttgttgccgcgcttggactccattcgtcggcaggcgggcgttaagatgggtattgcggatgagactgcggcagttcctggtagtattcctaagatctgtatcgtggctgctccttctactaccgattctagagatatcgagcggaggcagacgtctgttgatgttgatcttctggctcgtgcgctttctgttggacagccgcataaggcggtcccgattactgtcgcgttggctcttgctgctgctgttcatgtgccgcagagtacagtggctggcgttgtgagtgaggatcctgtcgatagcgctgggcttactattggtcatgccagtgggaatctgttggttggtgccaacttcgatgcagatggcgcgttaacttctgccacggtctttcgtacagcacgtcgtttgttcgagggacgtatttactggaagaacgataactgagcgggtgaatgatgttcgattgtacaatataattggcaggaagagtacatgcacacatgtatagccggctgaaacaactgaaaagaaagacctgatcatatgagatatgcaaataaaaacttttattcttgtgcttcacaagtggtatatctatatcatgatctatccccagctttaagcatgtctgccgagatcaatatcagcaaccagcttcatatcatcagtaccagccccgtcacccagcccaaagaacggcttgacagcaacatcaaccacctcctcaaacaaacgcccaataacagcctccttcagatcctcaccagtctgcgcgaaatccgggtacgcgttgagctccagcagccacacattcccaagagcgtcaacgaggaaatcaacaccaaacagctcaaacgcattgggcagagtctggaaatgaaccatcataccgcgggccgcagcctcaaacacctcaccggtcaccgagcagatctgatcaaagatcttctccttccagtctgcactgaaaccggggacgtggtggtcgagatcccagaagcggcgcacactatccttgttcgagctgccgccttcctggaaacaggtgttggtcagatggcgcgcgaggtcggcgacgtcgtactcttcatgcggagcgcagtagcccttcgcagcgaagagcgcgagcatctccttgaagacgtagactttgagtgatcccgaggcgaggacataggtgcggatgtggaatttacggtttgaggatgacgggaggaggagaggtgggtcaatatagggctgtacgaggaagtggcggagctgcgaagtgacgatccctgtgtctagggcggcgctgccgtcattcgcgtcgtcgccatttctctcggatccgctctcgtcgtctgagtcttcttcccactcctcgaagatctcgcgtagctggtcttcgctgttgaagatgcggattccctggcctcgatcgctcatgccgggcttgaggatccaccattccttttcggagtcaggtcgatcttcgttcttagctaagctgtcgttcaactcgaatgcttctagcagggcgtcgtcgaggaattcggcataatcgagttcgaagtcgaaggcgggcttgaagtggtgtcgaagagcgctctctgggtgtttcgagatccaattggccactgtgtttgagagatagtgcttgcgaattaaagctttccggatgatgtacgcgcttgaaagagacgtcgagggcctggacatgatatgctcgaaatcgaggcgctcatattcccggtactggaaaaatggcgcagatgagtccggcagctcggacacagaagacacacgcttgaaggcacttcccaggcgacatgttaatgcccgttcaaccatttcttgcacgtaggagttatcgcagtcgacgagggagtacaacgagggcggattagccgatctacaagatctccgtctatcagaaagggtgccaatacttaaagaaaatcaaatcaaaggggaggggatatagtatctaacagctaagccagatatctaaggtgggtgcaacatatagatttcggatagaaccctccataccatgcatggcgtcaaagtcgtcactcacagcttaatctcccccgaaataccgggcgcgggcatgaaattggccctgaggggcgtgacgctgtaaaagtcagtcgatgtccaaaagtaagagggcattgaacaaacctagtcatttgctccttaacagtccagccatcattgccaggctcactttcctccacacttcggtaaacatcctggaaactcggtgcccacttgaaatgcttgtgctgaattccggatggcttctggctgttaccgacaatctgatctggttgctttcctgccatttcgccttcgttgcgtagttgctcttcttgcaaatcagggtcgtctgcgggtgtggggtcgacagcctggaagcaactcccggatgtccacgtgttctgcagcatgtcggtatataagaccttgttcttactaacaccgggttcgaggggaacattgacgctatagaggtgcaccccatctgcccagttcgcgcaaagatgctcaatcaacttgactgaatggcccgcggcctctgcgatgataacagggtcatggtttcgagagctgaaagcatacgacagagcaattgagcgcttgccacagcaggcaccttccaacgctgcgccaatggttccgctcgacaatgcgaataatgccgttgtgttgcgaccatagttcggaccggagacaatcacatcgacagggccatgttctttaaagtagtggtataggccgatctggacacagctcgcgggagttgagtcgatcaaaatccactcttcgccttcgtcgtgttcaccatcactgccacggggcaggttgtgtgttgtcccgtcttcttgatggagcgtgccgggccggaagtaggtaggtttgacagaggcgcctaccatgtgcgctttacctatccatgatcgttgctggtgtggtagaatgaccgagaccgtatgacctgcggactggagcgagcggacaagcgaatgcacgtacggcgatgactggtttgacggaggaccgtcgtcgttggtgacctagatagagataagtcttcaagctgacattgcagtatctatatctgcttaccaggatatgcatttggggtgaagtggttgagatgtgaaggatggaggggaagaaagttcccccccgctttgcgttgtcgcaatcggcccagatgatccacaatgtcattcccactatcataagacattacaacatatagtaccattcagctcagctaggccaatgaaaacacatcattgtgattgtgtcaaatgactgcgccgtctctgtactccacgagcttctgcgctttctagtccagagcctgtaccagcttcatcaacatcagccggatagcttgagagcaacctcctctcctgctcgggctcttcctttttgacatcggaagattcatcagaagtattcccgtcctcggactcttctttgatagagtcctgcggctcctccttgatctcattcttaggcatagtcccccaaatccaagtcatggccagccacgtcaagccagcagagacaatagagaccgaccagaacaaagagctgaaaacaacaaaagacgtaatcttccaataatacataatccatctatcatctgttagccatatcccacaaaccacctaatccccaagaagacctacctaagccctgtaagcctagcacggaactccacccgggcagtgtaaatctgcatgtccgagtaactttggatctccagcctcagactctgcggcaagttctgcgcccccttcgcaaactcaagctgctccatcatcggcacctccagtgtctccgactcccggcgccagccaacaacatagagcggcatacgcgccactctccgggcaacatctaccagcggcgaagcataagtcatgatagcagggcggcgggcctgcgagatcggggcgctattcgggccgagtaagagggatgaggcggggcgggatgagaagagggtgaggtcgagcatgaagttgcctgtatcgaggtttgagggtgtgcgtgggagctcgagcgtcacggatacgtcgtagggctgaagagccacaaattccgagtcaaaggttgctgtaccccaggggttgccatcgcttgcacaagttagttgagctgggtgtctttgtggggaatgttgttatacccaaattgtagatggacttcgcgttgtagtccgaccgtgggaataaatttaaaataaaaaaccccgtaggcaattgcggagatgcctattaggaatgatgcggcgcccatgaacaacagcgtgttcaggtatagccgtaaggcggacttggataccagcgcgcggaacggcgcgaggatcgcctcctgtcttgtgtcagttgcagctgagaaatatgcatcaatacacccaccatgatgatttccctgacagaagatgggccatattcggactcgtctccaaattctgagtccgccattgtaggagtagttggcagaaacaacattccgaaattggaagttgaggtcatcctgttatctccgttatctacaccgaggtctgcgtccaagcttcatatatgcctacgataatatttaccaactcctagccctttatttagtaattgtccagtgatggcatgtctgacagagctaaacatccactggttaccgcagatttacagtagagaagttctatttcttcattgtgctgtcaataaagttgtatacctacatttgtatataaacgagaccttcggggctcatgtagggatacctagattaagtctagagcggagtgctagtttgacgataagcgacaaaagaagatgtggttcattatactagaaaacgccatacggaaggcccaaaaagaagctacaatgatcataagaatagtaaattagcatcgccccatgcagataatgaagacaccgccaactccagcttttacagtcttatcattacaggtcgcgggcagcatgagacgcgaaaaatatcatggaacctcaagtcatgcgaaaatcgtaagagaaaaataaatatgcatgccatcaccacggctaacccctgccgtaacatgaaactgaaaggatagaatggcaaaaaacgcaaaagagcaattgcggaagagaacccgtgaaaattacatgcaacaaagtactcctgtgccgcccgagttatcagaaagaacttgaggagagacatgaatggagaggatgaggaggagaagccaggaggggcttaggcgatgggccgagggctctgttgttggatatgttggagaagagcgtcgaaaagacgaccgatctagagagttatttagtatcgcgacactgtggaagattggtggtaagcttacctcaggtgccgcctgaatgaaggggaggcggaagaatgagtagctccggttctggaggagctcctgcagggtgatgatcagaccccatggatgcgggcggtgcacaatcagtcgctccaacaatacgcgaatgatttgttggcggatatccgagtcatcttgctcagagtaatccacaccaaacagacggagaatagtgaagctgaagaagtaggtgtggctgttggggtagcggagctggttggccattgcactgagtaagtagtagcgactttcaggacgcagaacttgggcgatcttctccagaagagcagcgtgagtcgagttctcaaaggcgctgcgggtattgcccttggaggcatgctccactgcagcttgttggccaatatacaaaacaagcgcgttgactaggacgacatccacgtcgacggggacaaagaggaggccagtttccttgaattcggggttaagaatggcgtcacagagctgctgaacagcagaatcggagatgttgtcattctggagtacatcatcaacaacgtccttgatgttggcaagctgcaaaggagcaacgatatcaccggcgatcttgggaatttcccgcatctcctcgatacgctcgaccttcaatccttcgcggaaaggatcgggaagtttctggaacgacgaggggtaggcactgagaacaagattgcggagctgagcgcaatgagccgggatcacattgcagaactggaaatggttctcagccacgaactcggggaaatcgtggtgcagaatcagcaagatacggagaacgcccttgtataggtccttggcaacgtaggtaatgttggcagcctttaattgctcgcccatgtaggatagcaatgcttggatgatctcgcagtaaggcgcccatcctgcacgatcaggcatgttgagcatgtcagacatgaacacgcggtgagagactaagcaaagccagccataaacgaacccgggcacgtaacggggctggaaggagaggaatttgttggccaaggcgaagatcattccctggtgctgctcagtgtgctggaggccgttcatagagtactcgcacagaatactcgagaagagacggaagaatacacgctggttgaaagcttctcctctcatgacctggtggtgattgaggaccagaaccaagagagacagaatagagttgaagtacgtagccttactagctttgacggcgccagcggtctcgccctggaatctgacgagaagaatcacgagcttagcgagggcatcgatgtaaaggaaggcctcatcaaggctgccgccgttggggttctgagactcatgctcaaacatggcgacggaaatgtcgatgctgagacggaaaaatagtgctgagtcctcctggctgttcatcacttggcggttgtggaggtcctgtaggaaagagtggaaggtgcggtcagtggcaccgggggccttgtaaataccgatccactcgctgaagatgtactccatttggtctcgcttggacctggcttggtctgtaaggagagagttgatgacctcgggaataccggactcgcgcagctttcgcacgatttcgagaccgggagcaacgcttccatcctcagcaagccattggctcatagcatctagactgccggagaagtctgatcgaagtgccgatggttcttcgttgaaaagaacgcgatccatcaggttgcccagcaactccaaagcaggaacattcctagatagaatgagtcgggtcaggttcgtatcgacccgacggatgtctaggaggcctgcgtcgatgagagcaacggtgaccggcacattgaacatgtgctcatcatcaacttcggaaagcagtgcccacgtgtaccgggcaatgagactggacatatcgcatagcttggcaagcaggtgcacaaggacctcaatctcgagggatccatgtggctgggaatacaaaagggtgcaaaccttcaaagaggttagtcgcgccaactcctctccattcgtcgaggcaaggatgctgcgcagtgcctggttgtattcttgaagaactgcactatctctgccaagatccttgacgtgttcttcaggggcgctgcgagcagactgctggagatcggagacgaggctttccactctttcccgggggctttgagcatcaaggaacccattagtctggactgggggcatttgagaaacagcaggctgtgtctggggagttctgtgaggaatggctggctgctcagccggggtagaaaggtttggaatagcaggataggattccccaagcacgtcggggagctgacggccggccgatgcatcagtggatggcgccgggcctcgggattgacgggcaaactcttcgtagatggcgagttgctccttgttgagacccccaggcgtttgccggtaaggctccggaatgaacaatccccaacggttcattgaaggatcaatgaaaggatcgttagaacgactggccagatggcgacgacgagcctccaattgaggctcaatcaccttctcgatctcgggcagggacttttcctctgcagctttctcgacaatgccacaggcagcatccaggttatcgttgacacacatcagaatcaagccttcgggcataggctgctcggagtactcttgctgaatcatgcggatatagttagtcatgctaaccttcagaggctctttgcaggtgacgagtgccaggctaccagcaagttgtcggaccatgatgcccgcggcgtggcgcacgcgttcctcatcgggttccatggcaaagtccttggagacaagttgtacggtggagatggatgcgatggtcacagaacgctcgactacgggggtaatgatctcggcaatggcgcgctcgactgcagtatgcacaatctgtttaagaattgtaggatcgaccatgctgctcgccgatgagggcaggacaaggatcttgtcaagacttggcagtgttgacatgatggcggcgggggacaatctctcattccggatggctgggttaatagcgctgagtgacaagtcttcaaatggctcaagaccttccggagcgttaacagttgacagttgttcctcggcatgtgcagcacgatcgcgaatgacgattgccggctcaattgtcttatggtcgagatcaagatctttacagagaacttcgatttcaaacttgagattgagctttagttcggcgaaatgataaagctccaacagcaggcccaaaatatccatcagccaggggttgggtggtttgaagactgtggatttggtagcctgcacaagaactttgcaggtgaaggggattgtaaccatgaggcgttgagtgtcgtatccttcgaggagcaagcccttgaagtagatgttcttatgcttaataggtttgtctttggcaatagtcagtgagccaagccaagcaccaaggttcttcaggtggccgcgatcggtagacgaggttaaggtgccttctgagttaatcaacttagcgacactaacataggtctcccgtaagacctcagcccagaggatcttgtcaccaatgcgcccaagaagatcaagatagagctgctggaaattaggctgcaacttggcacgttcttccaccaggtatgcggcgaaccactggtggtgctggtcacgcaacacttctcgtagatcttcaagtttctcgtcaatgttctgctcggaaacattgttaagaacgaaaagaatcttgtcttgaatgtcttcatccggttcttcgtagagctcagatcgaagaggtgggtcgagttgaacagcacggaacttgcgcacggagccatcagcgatgggggagtcaacagaattgccattggtcaaaggcacagaagcaagaccatcgaatggtcctgcctccgcttcgccaatctggtttccctgttcacggagcacctcctctgccttttggtatatgggtgtgccttggagagaggggatttggaagagcaggtggcagaaaccagcccactcgggaagacggttaatcaactgttcaatcgcttccacgccgaacttgtacatcgggtcatgaggctcatgctcgcggacagcctcgaggatcataccgagaccgaccttcagcgtgatgccatcaacaagacggaagttgattatgccaccgaacatgaccgcagtcttcgtgagagcctcgagcgggtattcatggtagcaatggtattcgtcaaccaggccgtgcaccatgcaggcgaacagatcttgttctgtggggtcgcgcgaagacttgtatttgcgcatcaactccagcatctcacgcagcgagagttcctcgtggtacattttaccaaagagctcttgcatttgcttgtcaattgactcaggcaacgtgttaccgttctcgccattggcgtcgattatatcatcgaatccttcgccgtagttgatcagacgaggatacgtctggatgcaaatgcgctggacaggggtgagattttcgcggtccccgacgtattcctccaatacagacaaaagcgtataaacagttttgactgcgaggctgaccatttgatgagcagactgctccttccgttggacgtgcaattcgtcctcggccttgattcgcaggaacttagagagcagaccacccatatcaatagcgcctttctgtgcggcattccgaacccactgctcaagatcaaagggactcttgcggtgggagtagcaggcgagatcgagggcaagaccgttagtgaacccaaggagataatcgagccatccgtatgctgcagcgtgctcatagatcacagcggtggaggtgggatcctgagtgaatgtggtgaaaagttgttctgatacccactgtcgttcttgtctccaagcaccttggagagcgagctggtacccatcctcttgcttcgagatgaagacaatgaatgtgcgcaagacaaagctctgctggacactggtccacggctgcggaatagccagagcagaaacgaggaaaaccggcaaatcaaactgaacgaccgcctttataaggagctggctttctgtcgcagcccacgaagcctgggagaacaaggcaaggtcgaaaattgccttcatagcgtccatggaccgaagaggtgactttgccgcacgctcgccttgcaatttgacgatttcaggggcatcttcaaagaagtcagtggggaaagttgcgcgaagattagggatgtgcgatgggtcgatccgagaggccacaaaagctgttaggaatgacatctgcgtgtcacgatgctcccagtctccaccccaaagcttttgaacatccaaagaggagtcgtcgaccgacatggcggaaagaacattgtacaacttggtgaattgtttcggatccactctgaggccctcacgatcgaagtggcggaacacgaggggccagtttattggcttgtcgttatatgcacttaagaatgtctctagtgagaattgttcccaatattgcgacaagatcatgaagagaagggcgctggctagatgttcttcgctccaattcctctggtctgaatttagcaattcacttattgtctcggtatgcgcagtggcacgagctcccttggcatgaagctgtcgtacaaggacatattgagggttcacaaaattgaacatctgtaaagcagaggaaacttcgaatggcatatccaagccaagtttttggaatcgcagattggctgcgtaaaccagcttcgccttgacatcgtcggtaaaattgcggggagggtataagataaaacgttcaatcgtcatgccaaggaaggagttgctgtaatccttagtcacttcggtaggactcgccaagctctgtaagaaaggggcaatggaattcgagaggatggcatcggctaatgaggatggttagatcgacccagaggcgtagataggagcaaacatacctttagcacgaagatctgacttgctagtcagtttgaaggccaatgcaagggaaaccttgacaactggatcgagtcggaaatgatctaggaaagtggaaaggtcgaagtcgcggaagatatctccttcggaagtatctactgtctcggcgattttctgagactgctccatgtccgaggacactttctgcatctcctggacaaggagagggtagttgcccgcattttcaacggatttgttaacaccggggaagatttgaggcgcatttcctgttaggaggcggcgaaagtatttggaaaagacctccattccgttcgaagtcacaagctgcggttattagaatcgactggattgggatatacggaaggaccaccaaccttgtgtatctgggcagcctttgtctcccacttctcttttccttccttctccgtaatagaatccagtaacaagaacacctgggcaatagatattttggtgagcgacgattggctcgagtgggcgtttgtagaacccggcttgtcagaagcaaaacctgtgggagaattcacggttgttccggacgagagcggcgaaaagacgcctcgggaagatcccggcccaccacctcctcccccagttcctcctccacccggggcggagcctgtagcagaggccaaatgggaccctatagaaggggtgtgagctcggaatttaggggacgaaagggttgttgcgtgctgttgcgagccagattgcaatgatgtgaagggcgaagacgtgtgtttgggacttccaccagagagacccctagcagagctcagcacggcggagaaagaagatggtgtcgaaaccccaaggcctgcgtccaagccccgggaagccgtggggggagcggcggaggatatgttggtcgcgagtggagtcaacccacgacgtgcgccggactgcgacacggaccgaccccaggcaccaatatcggtcctggtcgaagaagatttatcggtgccagaagcaatcgacgattgggcggaagggtgagggggagggaaggtcatctaggagacgcgatcatttgatctcgaggtccaaagacagatttttaagtcacaggcgcaataaacggggggaaatcgatagagcagatcaataaaatagacgcgagatcgtgcgatatcgagagagggagggtgtcgggaaagtaggataacactgtgggagaggaatggatgggggaacgatgagatggagaggttgcgagaggaatggggtgcaaggtgcgagttgtcggaagtgtgcctgcctcaggtgtcgagtgggagctcccaatcaggcaccaaagtgcgatacaaggtacgccttgcggtcgttcgagtgtggaagaattgctgaagctataacctgtttaagacttgatgaatgtgtggtttttgctccccttgctgttcattgcccatccttctcccacctacatgctggtgtttggagatggtcacgtgcaatgtcccctgcacgtgatgtatggctgagtcatctactctggggtccacctgccgctgcacgggtccgtgaatgtaccctaatgaagcaagacctagagcaggtgctatggagagtaatctgagcacagcccgaggatattcgagtatgtatgtatttacaatgtaggagcatgtaatatgtcttcaaagtgagcaaggggttttcaatgatttatgctatgtcatcctacacagcaagctaatttgtctatcctgcaatatgatggatatgatgatagaactgcttcgtcgttaatgctaagataggtaaaattcaacctagcatcttacgaatatagtaaatgagaacgatatatgatcaagcatatcgcaggacctgaaccgtaccaatccaatgaacgcctgagttaaaatccagtaagaagagccgatcaacagatagagcaaatataacccagaaaaatatgaaagaataacccgcaaagtgatcagagtcatgtcatgccgcaatgacagtcagcaaaaatggcgggggcataggaacggatgatgcaagaaacgaagcatcccacaaggccagtagcttgtggggacggaaggaagataaaatcacacagtcaagaaggaatacgatcatgtgcacatgagtttgagaccagttcgctggccaatccaacgccaacgcctaggtccaccgcagaagagaccacaatgaataaatgatattgtttcaggttgagtccggctagtcagtcagagacacacagtagcacgggctagcgtaagatgcctgggcagtgtatgtctgggcagtgccgcctttataattggtgtaggtagtagtcggcgtgggctcgttctctttgatgttgatgatgctgcctgagagaagcgccaaacccccgtcattgcgaacttgcatttgctgacagtagggagattctcgtgatgggtcgtctcggcgctcctccatcttaatcctgcgtggataagcgtaggtggcggaggagtcgcgtttagcgtcagcagtggagccagctgtgcttgctgccatgttgctgttgatagaagcagtggtgctcaaggaactcgacgtcgactggttgacgtacaagaaaaactccatcattgtgttattccaccaacaaaaccacggcttgtcgccaatttctgcggtctgcttcaaattcttgtaggcatttgcatttgcccatccgtcttccacgaatgtgcgcttagaaatggagttagagaatgtatcgtccggaacaatgaccaacttgtcgaagggagcaaggaagaacagagcaggacccatgccaatatcagtggtatcaatggccatactcaatgcttgtgtaggcgaagaagaccaatacggcgcctgggcaccatatgtaaaggtcggggtcggaacaccgtcgtcgaaaacgatggaatggtggccattggattcgccgataaaaatatcgattgtgctcggtgattgcatgcatttccaggctttgccgtaattcgattcgtccacgcaaagcccagatccattctggtaaccggaaggtaccgtgtagtagcccgtagggactcccttgagacctgtgggggtggatatcattgacgcatccatctgaggggttgcggtgaccgttatgattggtaaagggctggattgttgggcctcctggtgttcttgctttgcagcttctgcggctttcttggttcccagaacaccaccaatgacgcctccaatacatcctccaatgagcataacagttgcaatgaggaccaacgtccatactggcaggccacagcatgcggtctgtttccccttgcgtttaagcttctcttcgaaggccatgatgcctgtggtcgcagcgactctttcctccccgtgcccattatcgttcccatcaccagaatgttcaagcaccaaagcccttgatgaggtttctgaaatcggcgccgctcttgaactttcattgttgagacggtgttcctccggcggaggatcgagatcgactaccgtctcaggccctgggggcttcggtataacaccagttggatagcgtgaatacggtggtagcggctctgcgtgaccatccggtccaatgatatcacccacatcatcagcctggcgaccagcgggtggttgatatggtgggttatggcctggaaatccgactgggatgatatcgtcatccattccttcttcgaccacattttgcgagtacatcgcgtaggggtgctgcggaccggttgacccttcaagtgggcgttcaattgggcggatcgtcgaagtactacctacactgggcgaccggctaaccccaacttgtggatacataccatatggatggctgggtccggtggctccggtgtaggggctcagagcgcggggaatcgagaaacgagaagaaacgctctgattgcgctggatcatagaaggcgtcgagttgagagaggaggttgagttacggttgttggcgaaagcataccccttttgaggcagacttgaccgatgaggttcatcgaaggacacccgagcgtcatcagcgaacgggttatcgttctcggtcgggcccgtgctaacagcccttggctgggtgttttcccgaagagtagaggaggatgcaatggaagagggactgtgggggcgttcaatgcgatcggagtcaatggtttctaatgagtattcgtcggcgaagacatttggattggaggtggaggtgcgaccgaaggagcggcgaggtgtcgaatcgctggagagttgtggcgtttgagaggattgtgaaatagagcgagaatgctccgatgaaatatgaccagacatttccctatcggtctggcagccctgtcgggccacctcgttgtttgatcaatccgtttcgctacccgggcgaggatgggcgaagaatgggcggcagcaagcagatatagcagactctgtcgagatgttgaggaggaggaggaggaggaggatgttgatagatgatcgagatagaatgtaggatgagaaacttcaaattggggaaccctggaagggaagggaggagtttgagactttagtgtgaccagtttactgaggggagccgggggagagtcaactctcgggccaactgaaattcttggctttttgattttgcaccgtcttgggggcttttttccatggactctttctttttcttttctttcttctcaaacattctcttgtatcctggtatcacataccctacgatctactccgtgcctgggactcctctgtttgcgctactacgactagggtgaccaactagcgagcacttcccgtctacggtgggcctgaatgggcttcgccaccctgcatgctagtatagtgtgctattttgatattctcgagtatctgccagtacacagaatacagaatacagggttccaggtccctgttctagaccaaagctctaaggttgtttgcttctgcatgcgttggatttgaaacgttttctttctcgccacgcaaccacgtgagaacccctttgtgtgtttgggtctggaatggaatccactgaactggagaactgcaccttcagggcctccagtctgggcctccagtctgggttcgcgaaaaattccagaatacggaaggtttaaaacatcagggctgagcggatatctcggacttgcaaactataatcgtaaaccgggaaatgcacaattgctcatcatcatgactttgatatgagctgatggtcctaggacgtctcctatggacagatcttgtagcgaaaacaagggtctctttgaatgtaacgatgttggcgtaggtaaatacctgtgttcgatctcggataattacgattggagtatcttggctctacctaggacttgcagattatcaaacaccgcatccatggaagactcccacccagaaaggttacgatattcgctctcaacagagatgtcccgaacaatgaccgtatggatcaacggtttcagggccgttcagggcttcttcggtccagcccctctggaacgagattgcgtgcgtaacgggatccatccagggccaaccccatctgactccatctgactccatctgatactgagatcgggttttatttccgtctggtccctatgtatgtaagaacatcccagagaacatgagatggttccttggactgatcataagcctccaggacttgatctagatctataatatcgtacaattcggtatgcaggtcacatgtcatgtgggacatcaaagaactccccatgttctccttctgtatcagcagataccagaaatttacttcataaattgacatatgttgaaacgatactgtgtagctaatggaatgatcattgatagcctacgtagatactatacaaaccttcatcaaccatatttccctgccaagaattgcataacatatcgcgaggaggcaaagtacaaatcagctacattccaatgaaacaaacctgattcaaatgcttaaggatgtaaaaacatgcaatgggtgattgatcggtctacaaggttttcggccccatagggtcaatatgctatcggctaatagccgacgcatcttatcagaccgatacatcaacatgactcaggaaatccgtcgttacatcccatgacatattcagcttgacacaagccgaacagcgtaggacctctcggagatatatatctacacatgttcttcgtcctaggagtatgtgaatcctgtgacttggtgtacattgagaactcaatatctcgattcagtatatatcctcagtcattatcgtattactagcattatagttaactaactagatacttcaattgacataaagaatcatgattcttaactaactaactagagcacccgggtgttagtgatagttttggcgcactgtgggttcgccaagccacagaccggttatgggcttggccgtctccaggtggcacagacctcatctattccctccttcggtcagccaacattttcatttaatcttttccttattgtttttgaacggcgaatttcttcggagactccccattgctacaagcgtatcacaaattctctgtatccgcaaaccatcggtctgttccgggcagtctgccatgtttggtcctcccatcatttgtccaccagtccaaaagcattccgcgaagaattcttccaaaatacatcacgatgatggatgtaagtgaagcctatcaaaggctttaattacaaaccctgaatatagttagattcaacgaggtcaaccgtttagaggaacgatatgtctagtttcgaccaacagagctccaacggatcgccggcgaagtattacaacagggctattgccccaatgtcaataagcacgctggacagactatatatcagtccccaaagaaactccacagggcttacagcctcgaagttgtggatttttgtcactgcctcattgccgcaaatcatcctctatgcatcgcagcacaactcgcggtcataccgtatctcttatagtgagcgtgaaagcacctctctacgtaattatattcttctccatcttaggcgtagtatttatatatcgagcacaccgcatctactttcgtgagcttcaactattctagtcttccagtcgacgaagcacatcgcgttgagcttctccagcttgatctacggagcctgctacgccttcgcgtttcagttcctttcctcgctctcgctatgattttttgcccggcttctcctatcccgttctcgaatacttagacgcagacaacattatctgcgggagtctctaggagccgatacatttcttgcctcgatcgcggaagcacgtatattagccaatggggtttcctaaagagggcttactcacacaaatcagggggatgtttatctttgatttcaaggtccgggagtctatattaagaaaaatatatctttcatttcctatctaatcccccttactcttcttccaatcccggtactcagcgataataaaatatatctgtgcagcgtattgtgctatcacccatctctaggcaactgattagcgatgttttttaagcattggtatagtgatcatgatcaaacctaccttctaagtcgattatttgaactcttggttcctttgacccttgaataccgagagttgtagtaatccatggtagtatttcaagtcccttttgcatcaatacttcttttaccaaattcgattacagagccctaacttcaagtaggacgggatctaccagaccaccgtcgtgcttaacggagccgtaactgcggccaatactctgggagactccacatgtgttccatatttcgcgggacgtcgcaatgattcgcgatctcactctggccatccgtctgcgggtggtagacagttgacaattttgattcctaggatgcgacagaattccgtccagaattcggagataaactgaccgcctcaatctgagacgatagtctcggggattccagtgattcgtatgacattgtccatgaataaacgggccatttgcttcgcattggtatccttatggcatgggatagatacgggtctcttgcttaaccggtgaacaacgacgaataccgcgtcggctgccatagtagtgtggttgaaatttgggagataccagagagatatgccgtagtgatgagggtgactcgtacaccaggcttaaacataccttaagcttcacgatgcatagaccctttttcatattcccataatttaaaagcaaatgaaagtttgagagtccgtggcaaaagataaagaggagaaggggtgccgaagttttcttggacagcttagaagccctcttcatttccattaaaaactggtcgatcattctcgctgggctaactacagctgcaggcgaaagtccctcgctgtccaggagttggcttaggcatacttttcgttcctcatagttgtcgacagggttggtgacgctggccaagctacagacaatagtcgaatgatatactgtaacttaagcagtatttttgatgtagatgagagggaaaagaagagcaatcagagagtagaatcaacaaagtcggtatttatagatgggacaggtactatctacactagtagcaataggttatctaggcactcgaggtagtgtgagtctggaaggtgctaagatgtaactcgtgagtgggcaagaagtgagaaagaagggattgaaatcatataggtattaagaatagttttcttatgttttaggtctcatgctactttgttagcatcatggcgatgtgacacagatatcaccatcctaggattttaccttactgttgccgactcaaggcttacttggcaacttagtaatcgagtgttgtcgatggcgtgaattgatcgaatgcgatggaagatagcaaaaggagagtgcaataaagttgatcggtattagtggcctctaactagaaagagtacgtaccggatcctaaatgaaatagaaagggtagtgtggccagtctactcaaaagagaaagagtgatgagttgaataaggagcacccttggaatttattactcaggttgcgaatacataaaatgaattccatgtttcccatccatatcatcccttcaactccgatgtactctgtacatatctctctggctttgagcaacatttttcagtaccataataatttaactttcaattttcctaaatttgatatataggggtagagtcccttatcaacaaccaattagtgagaatggaaattaagcaataacgcggttgttgaaatatgagattgtagttatggatgtgatgggccatggcagtgagatagttatgttatcgataagtactaaattaagggtattcaccgcctaccccttgagtaatagtactaccgtgcacgtgctgaagtatatagtgcccgctgattgggtaaagccccaccgcctactatagcgcaactaaggtatccggcgattatgaggtttactttcctagctcttccagcactactgtcactcatgatttttatcaaatctcttcatcctaattgtatttgaggctggctacttcctttgcagttacacttgattctcatcatgccggacgagtcgaagggaaagagcttccccgacgtctctgcgaaactctccgcgcttccaaagaaatcactttttgagcgtcaaaaagccgaagcagaggccaaacgcgcccgggaaaaagcagagacagctgctgtctatgaagaatttgtcaaatctttcgaagacgaggattcagttgcaccacagtcatgggatggaggatccaatacatttagaggcaggggtggtggtcctcccaggcgtcatttcgcaacttcctcttcacgcggcagtggtcatggatctcttgggcccccgccgccgtcactttcacacaaacgttcccacgaaactttccccccctcccgtcgtgaccatctcaaatttgaaaacgtacttaccccatctgaaaccgacagagcacttgacgaggaggagagggcagctccaaaacccacgctatacctcgcatcgcttccccccgggacatctctgtctgtgattaaggcattgatcccctcgaccctgaccgtggacaatgtcaagatcatcaccccacccggacaattgccaacccaccgcgagtcctcttctgcactcgttaccctctcaagcgactcggccgcttctaccatcgacgcagctgtaagcacgctgcagaacaaataccttggctgggggtactacctgaccctctgtcgacatctttcctccattgcaatcaattcaaacatgcctttgccctccggcctctcgtcgactactacttctcttccgtttggcgccaagcctattccgccgagtctgggcacaagcttgagtcgagctccaccaccagggccacatcgcggagggttcgcacccccaagctcgtatggaccaagcgttggtagaaatggcccaaccactcaggtgcaggtggagctaccgacagatataagacagttaagacagatacacatgactattgaaaaactcgtgaaacaaggtcctggatttgaggcattgttgatgagtcggccagaagttcagatggacgaaaagtgggcttggctgttcgatccgaggtcgcctggtggtgtatactaccggtggaaattgtggcaaataatcacagaccctaaaaagaagaatattgataagccggcaatgatcttcgaaggtggtccgctctggttacccccaaaacagcatctcaaatttgagaacgtcactcgactggaccaatttgtgtcacaccctgactacgactcctctgacgaagaacactcggatggagaaaatgaaagacggaatcttggtggagcacctcaggacggaagcaacacacgcagcgatgaacctaacttcttgaacccattgaagatggccaagcttactcatcttcttgcacgacttccgacgacccattcgaagctccgacgaggagatgttgcgcgagtcacggcattcgccatcgaccacgcggcagtgggtgcgcctgaggttgtcgacatggctattcgaaacgttttccgcccactagcttacaccggcgccaacccaaatagggaaatggaaaaaagtgccgctagactagcgaccacagataaggacaatgcaactccatccgatgaacaattggatatgtcttctgcgaagctggtcggtctctatatcatctctgatattctctcgtcgtcggcaactagtggcgttcgccatgcatggcgataccgccagctgtttgaaaacgctctccgctcacgcaaggtgtttgaacaccttggacgacttgataaggacctgaaatggggacgactgaaagcagagaagtggaagcgcagcgttggcgcccttttacatctgtgggaagggtggtgttgttttacgcaattgaaccaggagcatttcacccaagtgtttgaaaagccaccgcttacggaagcagaattacaaaagcagaaggagacagagaagaccaatgcagatcaagctgctgttgcatttgccaagagcaagagtcgatggaagacagttgatgatgagcgaggtgggaagtttgaccctactcgccctgcgaacgagaacaagctatctctatctgcccacgcagtggacgaatcggtgcatgaaaaggacggaactgctatggaaatctgtgagctgaagaatgttgatggggagttcatgcttaaggcgccactatcgggcgatcaagatacccaaaccgagattccccagacactatctcagaacccacctcagcacccaacccaacctgataaatccgaacaatcagctgggcagcaggagccagaaacacggcgacggaagccacggcccaaagctgaggacatgttcgcctcggattcggagtaaggttgggcattgtaattataccgattagcatcgaacgataccaagatacttgtaatgaatacaaatgaacataaatgaacaatgaatgagtacttgaaatgttttctctctatagacttgtgtagatagagacagttatactgaagacctgtcagttggaggctcttcagtacaacgtatcaggcagccaggcatcatcggcagaacatttcctgccccacaacccctcatcaacaaatacctttctcctttcgcgctcaacttcctgtaacctttaaatacaatcgcatcggcttttttctcttgtattccaaattcacaagttcttcataatggctggtatgtcttcctctccacttggttcctatatgcccctcctgaaggggatggaggggtctggttggatccagacagcagtgtgtgactagttgcgcaatgcgatggaaaagacgaaagaaacactgcaaacatacatatgagacactggctaacaaattgggcaatttatacagacttcaacgctattgcccgtacgttatacccacactttcctggttcatccacaaggatttagcaatgcgcctgttccccggagcctgtcctcctaggtggaaatatgcctgaagagatgggtgtcatattgtgtacaaataaccatgttctaacctctgatcgacctgtacagagcagtttgtgcagttctactaccagacctttgacggaaaccgcgctggcctggctggtctctacgtaagccccgctctcgagatattcttccaagtgtgtttatggactaatagcaattatcaattaatagcgtgaccagtctatgcttaccttcgagaccagctcggtccagggtgttactgccatcaccgagaagcttagcgttcgtcaatcccaaaggaatagcagaagaatatttcaatactgactgacttttgtgactctagactctgcccttccagaaggttcagcaccagattgctaccttcgatgcccagccctccagcggagatggcattgttgtgttggttaccggtgccctcctggtatgttgaatgcctatgacttcttctattttcttggctaatcaatttctctaccaacaggtcgatgaggagcagaagcccatgaactacacccagtgcttcaagctgcagcccgatggtgccggaagctacttcgtgctcaacgatgtcttccgtctgatctacagcgcccagtaaattatgggccccgaaacaaataccacgacgcgacgacagggtgatgtgctttcttgtgaagaggatatgccttgacggtggccgggttaagacatctgtcgttttgtcgcaagtgactcccctcaacttgcgatatgcccattgaaggattcatgaagaatttatttttttggaccatcgatcattctagaactgtatagcatttcatttctatcaagctaagatatagcacggtataaaagcaacacatagcacatttgttatacggacatcactggctctgaagcaacggcgtctcctcagatggtcgctcctcatgcacaggttcttgctgagcgctctcatcagcaggagccgactcatcgggctccccggtttgatcaacgtgcccagctttccccttgttgttggatccaaagtactcaaaatagattgccatcgtcaacaaggtaccctgcaagcaagccgtgacaacaagcacgccccagatactccagccactccaacccttacgggcagccaaactagcagcccagacaagacttccgggcgtctggatgcacatcatggggatactcaagctccccacgcaacgcagccggaaggtagtgtatatctgcgggaagtactggatcgacgcgaggatcgcagccaggataccgaggaagttagcccaggtcgcaacagcggccgggtagcgtagctcaaccgctagggaaattataattgtaacgagcgcgtgcagtagacatatccccgttacgatgagcgcggtgcggtacgtcggtccgctggaggtggaagacacactgcccaccgggtctgtgggggatgtagcgcgcgggaagtagatcacgaatagcaaaagactatgtagatatggtcagacaagctcgcgtgggtatggtatggtatggtatgggtgtgggtgttcaatcgggaattcggaatcagatataaatcagcgcttcgttcgactcacatagaaaagaaagcaagccattgcatggccatctggaatacacccagtagccctgcgaagcaagcgaatccgctgatatcccggcagcaggcgacatcttgtgcggtggatgggaataccaggatattggcgaaagctgaggtccctgatgttacacctaggaggataaagtatggtgagataccgaaggagcttcgccgggcgatgatacggatgtgttgggggaggtatgagaggaggatcccgaggataatctggctatggtacgtcagtgactggggactgattttaattctaggggcacgtacatagatagagcagtttggaagatgcctggcgaggccagctcgcggcagtagggtgttaatgagtccattgttgtgtctttataaaaggatgaagttcagatggaggtcggttgtcgggagcttgtgacgacagcgctgattaccacaattgattgcaccagttcgtcacatcggatattctgctttccacttcaccaagataagtggaattgctattttcaaagacagaaaaggaaatcctaagatatgtatcataaacttgaggacctcgttgggcactcctctcctctgtcatgttgccttgttgtcttgacgccttggtgccttggtgccttaaataggtggtgttagtctttttactatccctagttgggattagtgtcaaatgtctacaaccttatgtacatctggggaatataacatggattcattaccaccagaattgatttcccgaatgttggactacatcattcctgtcagatattcacgatctcccgacattcccctgacttcatatgccaccttgaatcgttgctagctgctacttatcgatcacctatttgtctgatccggggtacgcatctttagtcagcacctttagctgattatgtaacccacagttgagcatctgcccatttagacacttacactcataccttttgtcagtatcttattagttcacagtcctatcgctattgtgtaactagttatatgtgtactcatttctgtcatatgtcactaccgtacgggaatggcaaaataataactatggcacgctaaccgtattctgtaattcaccgtcatcagatactacaatggatgtttgtatagagctggaaatatagatacaaaagtagcatgtatacatatctacattctatacattaaataacagaaacaagctaggaattgttcccgacctggaataatgaattgatgattcatgcactcttagctcaatccaaggcaaattccccaactacgtcacttcgcaatcatccatgcttggctctttcttgcttctttctttaaaatcttgctgtgtttctattctcttcactgaaatattcatacttcacttgccaccaaaatacccctattttgtcaaacatactacaacatgaagttgaatttggccactggcctcatctgcttgctcgcttccactgaagtagtggcagcttctagctggtggaacaaggctcgtatgttgtcttgggtacaactatacccttcgcaagctaatatcatcaacagtctacaacaaatggcatgaaactgagctcgagcgatggctctccgaccatagtatggagcacttctctgtctagcagcttcaattactcacaattcacacagatattccctaccccagtcctgccgatcgccgcgatctggagaacctcgtcaagaccaactgggacagcagagtgcaaacaccccttggacaagctgtcgacaacgtcaatcatgagctacaccatgccagagaatggatttttgataggtagggtgcttacctttccttgttgtgaatgatagctaaccggtatagttggtctgactctcagttgaaggcattcctcgatcgccacggcatccctgccccccagccccgcagacacgaccttctagtcaaaaccgcgcgtgagaactatgagaagatcgctaccaaggttggccaaacggctgcctaccccggagactggctttatgcggagtggtccgactcggatctcaaggaatggctcgacgagcgtggatggccggtgcctcagccttccgagcgtgacaagctcattgcctcggttcgccgcaactcgcgcattttcagcctgcagacccagagcattgctgcatctgcatccgctgaggctgaggctgttaaggagacactgagtaatcagcttttcaatgcctggtccgactcgaagctgaaggaattccttgacgagcacaatgtcaaggtgcctcagggctcgaagcgcaatgaactcattgctctggctcggaagaaccgtcactacctttctgaccaggtgtcgagtgcctcctccgctgtagagggtgcgtttggcgctgctaccaccaaggctgggaacgaatatgcacaggctaccgattatgccaagctgaagatcgacgatgctttcgagactgcgttgaatggctggtctgactcccgcttgaaggcgttccttgatgctcgaagcgtccctgtccctcagaatggtaagcgtgatgaacttattgccaaggtccgcgccaatgcgcacaaggctgctggaggatggaaccagtacaactttgatacttgggataaagaacacctggtgtaagtacatacttgtctgctggttatgatctcactggcttacctttcctaggaactacttgtcgtccgtgaaccacaaggcgattaagcaggccgatgcctcacgcgaacagcttgtgaagagtgcccaggactcctacgccaaggcttccaaggctggcggcgaacagtacgcctctgcgacttcttccatcgcgcatgcaacagacacagccaaggatgctactttcgaccaatggtcgcactccgagctcaaggaatacctggacgactacggtgttccgacataccagggctcgagcatcaatgaacttcgagctgcggcccggcgcaacgcccattactataagtacggcactgcgagcccgcaagctacgatctacgccaaggtcatgagtgttttgcagtggtttgccgatcagttaaagatcggcgctgctagcggccgcgcccaaggcaccgaagctgctgaaaaggtccagaagaaggtttccgagcacacggagagattgcgtgaagaactttgaactaccctccttatatttgatctttcttgtttttgttccacaataatttgggatgcacggttggtttgatgtattttaaagttacgatgattatgacatttggattgtaacctgtgcttcgagttagttttgccttttgggtttacctagtgcccaaatacgccgttcgtacatatgtaaccacctttcagcataaaagaaacgatctcgcccacctttttagactgggtcttcctatagccgccgagacctctacttcacttgtgttatctcgaagatgacgcccgggggggggttgaagtcgaggccggcctccacgacttaaaactacaacacaacaaagaccatttccgactctagccttttcagggagaatcgggcgtctacgctccctacgccggtcgaggtgagaaccatcaacgaggagtcaggcaacatctgtggcacaagtttcaaccgacctccgcctgtcaagtttccatcgttgggcctgattgtcaaatatggagccgacaccaccgtgacagaggcagacccaaaatatggtatacaagcagttgaatggcaaagtaccagttcctgaggtgttggggtggaccgaagacggtgaccaagtctttatctatatgtctttgatagggcgcgaaaccttggagcaaatatggggtgctttgaacgactaggagagagaggctgtctgtaaagagctcaacggcatggttaagtcttggagatcgttagaacagcccaaccaagtcctttatgtgggtaagtctcattgcggtagctacgcagaactatgctaaagtgcttcctaggtggcctaaataatcaacctctaaatgaaatctttttttttggccaccgcgacctggctgcccattctacggtgcagacgccgtccaaaaattccagaatggctgcgatatcgagattgatggggaggtgtctatggtcttcacgcatgacgaccttgtgcccccaaatatcattttatcgcccgggccgaatccagtagtagctgccgtcattgattggggccaggcagggtggtatcctgcttactgggagtattacaaggcgcgtcacgtcaggccgaatccggaatattttgaagacttggaagaagaatggaggacgagatacctgccaactattctggacctggtcgatgatgagactgtataccacctttggctgtggtttgtcttgcctgagggtttctagttatgtgaatgaagatgtgggactatacaaccgtggtagatagacaatatatatgaattatgtatatactgtatccctgacagtagttcctagaagatctacggctcccaggagtgaatgatgtagcttcaatgaacgaggagtcagctcatactaactatgtctgcttggtcaatggacctagccaaagcatgagattcgcctgtcgtcttcatattgaactgcgggtcagttgcgatagcatcctggagattcaagagggcgatgtgatcttttgcaaaaggttcgatgtatgagtaaatattctacctttatccaagcttcaaatttaattgcttattaaataccaattcccagtttatatacaaaattcagagtcagatatgcgtctcaaaagcggttattttcggcgtcaatcctataggctatgtgtaaaatttgaggcccaaggttcttattctagattgcttatagttttttattccaagatggaaaatacaggtacaatattgtagttaccgaggacggtgaaatgaagtacaacatagaaaaggactactccgtatactataccccccttgcatccctccccacccgagcggaggcatataataaccacaagtttccatttcacaccgctattttcctgaattgccactctatctattgagcgatttacaacctcatttcggttagtatactagtcggcggattatgcgttgtccttgacggtgtaggattaataatctgatccatttggtctaggctcatattatggatgcgatatacaatcctctagtcttttttaatttctttttaatcgctttcatcttagtatattgtataaagactcccgcacataatctaaaaagtgcccctataggcacgtgactgatctgcagcctcccgggatccccacttgacactcccgaggtcgccttcctcccgtccaataaaaccacttccgaggtccaccaccggttttccctccgttgtgtacatttcatcgcctcatacgtcatgccgaagagcagcagcacatcttcagtgaagcgtcgacttcgaatgctgatccatggccgtagagctcaagtgatttcaagacattatgggttccaaaatacaagaccaagagcagcagggaaggttctccccacgtatatgcaaaccaatctgctaccccaaacccaatcttcttcggccgccggcaagcatccaaacgccgctcctatcactgctcctcggctgcgtgcccgaggagccggtgagattaatcgcttggactagtttttcctggccgtctccgctcccttagaatgtctgcacactggcggtcaagatgcactcgccaacgatattatgcatcatataaaaatgctagtggcagagcattgcccagccggcttacaattcagggacctgagatagtcttgcaaatcaagcccagattcggttgcgcttttaaattgatcctgaaaaaaaataaatcacatatcccttggcttgtcctcgtaaatgaaatatcggttattgccgtacacaccctccacaatgaatatgtattcacccaatcgttttagtgtggaatcacgatttaggagcttcggggtcaccctcagccaccagctttccaacgaccaagtacttctccatgaagcggtcttcccaggactgcaggttctccagctgatccgcatccaaatccttcaaatcatccaacggcgccgacagatccgtggtcagcatttcctcatcgaagctctggaaagccaagccgcgcgacgcgtcccggccagcgaagttctcgtaaggtccgccctgttacatttcgtcagcttcagctccaacagcgccacccggtgttctttcgcgaatttcaaacacataccggtccatagaagttcctgccaggagtgacgtcgaagacgcgcccgcggacagacaagtaaacggggcggccttcctcgccgttgaactcaataagagttttgggaatgtaggtcttaaagacagttggcggcggcgcacgggggagagtgatgggcgccctgggacggaagtgccagtacaccaagactccgaagagcgagactaagactaggttgatgggcgtcgcgatagacatcctgttgggtagcggttagttgggttggtgacgggtgagatctggggggggggaacacgaacacttcaggctgtggcgcagaatgatctgcagttttagtttctagattagcgggtgttcagaacatgagcagcaaaggacatacccatcgaggcagatcttttgtatttagagaaagcacaccggaacctcgggatgacatcttctccccgctccacgtgattggaagcttacatattctctttcattctttggcttcatggatttggatttaggagtcgtctacttctctcacgtgcgggctagagactaggctctcggacttcagattgaaaatgtaaaacgccgacgagtccctgaatttgtttcaagactctccactgactatcgcccccaatttaatctgcccactcctattagcggatgtcatgttatttcaagtttcaagttatttttatcgtctagttcctccttccttgcattttgcctaggtgttcgagtcatttttatctatataatttgttcgcgcgttcttcctttattccataggcttccgtggccgtgcattgtcgccgagaaaacagagccccttctaatattctgcggtcctttgcctcttctttctccctttcatcctctctgttgtgactgaaatccattccatcattttgcgtgaactctgcgctatcatttccgaccaaaatcagccctgtgtcacgtctagagcgtgagaaaatccgctatgtggtctaagagaccgtttcacaagcccaaacggccttcgattagcggccccatattgaatggcaatccacctaccacatcagaccctgttcatgatatggtcgccaaaagattgcccgctctgcctgagtaagtcttgtgtttgctacgtgttcaatagatagctaatggaaatcagcgacttacattcattacaatcagatgtcctgcgtgaggatatcgaaaggacgccgggcgtgtcgcctgccatttcgccggtgcttgaagcgcacaggcgagcaagcgaaagtagtttctgtgtctcgcctattggcgacggcgaccaattttctgattatgcgcgacaggagactgggaccttgtcttccccaactcctattcccaaggcagactatgttgacacaccctctcactcccgggttcaacctgtccaacctgtccagtatctccaacatgattacgactctaggcgattcatctctggtaaatcaacgcactggaataatttttcagccgaaccgaccttgagtgatgttgttagagttggtgatacccgtcaaacctctctccaaaaagcctccggacctggggctcctgctcctgctcccgctcccacttccaacctactgaattggggccaggggttcaaccccaagaagaccctcaatgcagctcgaagccggatcaccagtttctcgaagaccgaagagctttcgcaaaaggcacccagaagtagatcggcgtcacgtgggcttccagtggaagagcgtaccagcaaacgcaacggcaacggtgcgctaaagacgagtccccagctcgataactttggctttgctcctacaactgtgaccactatcaccggcggtggtccagcatccgttccccggagaccggcaacagagcacgcccaaagccgcctaccagaggagcagaaaccaatattcaagttcgataacgatttcagcgacatgatgttcacgaccgaggaatccattagccgtttcagctcaaccacatacacagccaccgagccgggaagtcgagatccaagcccgcgagtgagtatgcagcttgaaaaccgatctatggacgatgtttccacgtcctctatcatgtcccgacgccgcccaattccaatcagcgtgccgacttcgaagaagcccgtccgaaaacccactccatccgaggccgcacagcaaatcgcggatatgtccgctcaggcatcttcgcctccacccgaggtgcctctcgatgcgcatggccgcattaaggcaatggaggacaagagggatgacctgaatcagcgcagattgaatttgcaggcgttaatcctcgagttgagaaaggttgttcatcctacttcagctgtgtatgacctggctgctagaaccgaggcccagaagagcatcaaaggcattgaagacaagcttgcagatatcaagaaagaagagcacgatcttggcctgaagattactcgagcgtggcgtcgcctagacgagaaggagaatgccggcgatggcaataatctctgggtcaagcgagtcactagttagtggctgttgagttgtgaattggtccatgcgcgattgatcttgatttcatttctgcgattgtggagttgttagcgtcctgtttgattctactttttcaaggcaatgtgcttgttctttttccgatattgcgacatggtggttgtgttttgagcgttcgattccctgcattggcagcctacatggcaggatgatacccacttcggaagcccaagctgtggcggttaatgttgatgtattctagtctgattaatctcattgcttttttaaaaacaggaaactcgtatgtgaaaagcgatcaagcgcgaaataggtattggtggctaaagatatacagaagacccatagaaaataactatgggtgcagtgatgctgacgcgatcacacagccacccatcctccgctcgctcattgtacatggctcgtgtaggtcgtgaatatggactcaagaaacctggtgtcaaggctcgttgggggattgttggcaagcgatttatcgaggagtattcgatccgtttatttcttgccggacttcttgatgccttgctggccggtgttgagaggacccttcttgcccttggccgcttcctgcatgtccttgcgggccttggcatctagtggaaattagtaactgacttcgtgaagagtgtgtcaaaagccataccagccctgagcttggcctggtgagcgagctcatcctcatccagctccttcttctccttcttggctgccttcaagggcttagccttgccacctgtagatcataaggtattagtgaacaggattccaaggactagaatgcgaggtaatacgaaccttctctgccgataccacccattttgtccgaataaaataactgggagagcgggttggaaagagtcttgatagcgcggggtgtttagacggcgttggcgaagaaaaatttacatgaggggtgcttatccataccttctatggctggggcgaggaccgggctatttttgtgaatgttactagcggtataaaatgtggtattatttcaagaaaatacacaaatgttgtgctgcaatcacactgattacataaatttagcattggtgataccctaaggctagactgtatatggttagtgccatatccaaaagttatattccccgcggagatacaccacagggtagacggcaaaaacttcaatccaccgcctacttcaaccagactagcgtcgattctgccttatcgaccattgagcaactcgccatggcttttcaatcgttctcttgctgtcatcgacatcctgcacgtgcttttatctacttctcaagcctgttcttcagaaagctatgcgcctgggattttaatcacttttgcaaggctttggtgtgaaggcaggcctcttacagccggttggatttcacaaaccctttgagaagacttattgtcgctggcgcttttgctaactaagctttgttgttgaagcttcactccaaaagctgagtgaagtgaacccaagagaaaagtactgtacatacgtgtcgtttgaatccctcgaacgtaaacatgtcccttcccaggtcgaggtccccatcggtcccctctgagggtgagatcgtcgaatcaggcccagagacgaaggcaactgcgtcacaacctcctcttaatggcaccagcgttgaccgtcccaccagagctagcccatcctctgcgcccggatctcccgcctcgttgaaagacactcgatcgccaccccggcagaggtcgcggaccaggtcccactcgagatcccgctctcgctccccgtacagagagaataagaccaagcgcagtctcgacgaccccgagtcctatgatggatcctacgaccggcgaccccgcaatgagcctccgcggcgctacaggtctaggtatgacgacagacggcgtgacagacctggtccgaacaggcgcccgaactcatactacgactatgaccgcgaagagacgtacggagaagcgctacgatacagtgatgattacgaccggaatgaccgacacaaggacaagcggcagcgcacccgcagccgctctcgatccccttaccgggaatcgagaaaacccaagcagtattcaggcgacgaacttgatacaaatgttaatgccaggtcttcagcggataatggaaggcgcttgcccactgaacagttggtgagggaacgcggaaaggcttcggttggagcttcggacttgaagcttggtgctgaaaaagaaaagaaccaggtgcaggcttcttctaatctgaaagctcatgtggctgacgagtatgtttattttgttgctggcgaaaaagaacgtgttgctaatatccatcccagagaaacccctaacccagagcttgcgcaagagccggagctggctgagcccattgacgaagctgctgcacttgaagctcgtcggaaacgccgtgaagctattcgggcgaaacaccgaagccaagcgacgcctctacatctcaaagcactgaacgtcgaggttgaaacggattcatctacgcctggcactgagccaactagcgcaaaggaagcatctggtatgtttctctcggacaagcttaccctggtatcgaaactgacgcctggaaactcaatagattctccgcgagcatcccccttcgaacaacccggggaggcatttcctggcttcgttggaaaagatatggatgtggtcaaggccaatgcgcctgttggcactgacaaggatgagtcctctgctgctgattatgatccaacccttgatacaaaggaagaaagacaaaaacatggcaatgttcaggatggaaaggacgacatttcgtctgcagcatacgatgaaactaagactggcaagcaagatatcctcctccctgatgctcccccagtgccaccgccgatgaccaaggccttcgatatgtttgcagatgacgacgatgacatgttcgcagaggaagaacctgatgccaagccggcgcatgcttcggccacagctgtaccccagggcagggaactagacgtcagcatgatggataactgggatgattcggagggctattacgccgttcgactgggagagctgatcaacggaagataccatgtccatcagaatcttggcaagggaatgttctcgtccgtcgtacgtgcaactgacacgcagacagggggtctggttgccgtcaagatcattcgccagaacgccatcatgcgcaaggccggtatgaaggaaattggcatcctcgagcaactccaggaagccgacccgctaaaccaaatgcacctcatcaagttcgaccgatatttcgatcacaagggccacttgtgtatggtgtttgagaaccttagcatggacctgcgtgaggtcctgaaaaggttcggtagggacattggcttgaacatacgcgcggtacgggcctacggccagcagattttccttgggctgtgtcaccttcggcggtgtaacatcctgcatgcagatctcaagccagataatctccttgtgaacgagcaacgcaacattctgaaagtttgtgatctaggttcggcgtcgccggcctctgacaatgagattacgccttacctcgtcagtcgtttctaccgtgccccggagatcatcctgggtatcccttacgactacgccatcgatgtctggtccattggctgtaccctctttgagctgtacacgggcaagatcctcttcacggggcgaaacaacaaccagatgcttcggtccatcatggagtgccggggcaagtacccgccgaagctgcttcgccgcggaaccttgtcgcctcaccactttgatgaaatgctcaacttccacagcgtggaggaagacaagatcaccggccgcctgcacaccaagattgtggactttaagaaaccgacgcgggacttgaagacgcgcctcatggcacagggaacccgcgggatgccagattccgaggttaaagaactgagcttgttcttggacctcctcgaccggtgcttgagtctcaaccctgagaaacggatcacgcctgccgaggcattgaagcacccgttcctggcccctagggtgtgaacaaggatttgcattgattcgttgaccagggtccaaccctggtcctgggacggcgcagctcggaaggatcggcgttatcggggaggttgatctatgaggggattctttgtccatatggaacagtaactaggttcaaatcaagtccatatgtaacattttcacaaagcaacccctgtccatcctcggaccatgttgtaggactcctgccaaaccgggagtggcttaggatttatccaacctttcattagagcataaacctagcgcagtatcgaacaaagaaacccaaccagctcctaccaaaaacaacctagctctactccgtacctaggccccagcacatcggtagcgcgcgataatccattcatcactatcactatcactatcaccaacaaagaaccacccaacaaacacaaggcccccgtcgcggcgccccccttcccttcggccctagccccctatcgacccaagcccctggaactatagatctgtacaaaccaggtaaccaactaatcaaactcaactccactccacgctacctatcgtataattgcaagcacatcgtatgatgccaaacaaagaaccccaaaccttcaagcccagatccaatccaatcccaacacggcaacacaccaaactcacgaaccctcggacctcccctccccgcgagaccactaaaaacagaaaacccacgtagccaacgcccacgtaagaaccgtaagaagttctagatcgcctctaagccaaactcagtcttaggccagtctgcacccgtggcttcgtgggtatctagccgaaaccttgggcgttttccggttctgagtttctgattgtggggaggtatgaccttggattcgggatagtctatcttggttgaaccatgggaggaactattaactaggagattgaagataatagtccgtagatagataatggataatagataggtgggtgcgggattatctgattggcacggtgcgcaatgcatgtcgaatggagtacaggacactagagtgcactattgcctcctttcacgggtctgttctcttaggggcggcaaaaggcggggttcttttgcaaattgcgctcgtgtttcccggccgttggtggccattgggtggaagacgtgtcgtcgaggtaattgttggcaaatgggaggatgggagatggcaggatggtgaggattggctttgggcttgggcttagatttggatggatgccgatggctgccgatggagtgttttttgtttttttttctgcgtttgtgttattatttgcttttggtctggctagttactgttacttggggataattgtttctgtatgttgtatgttgtatattgtagttatattgtacggtcggaaaaagcaatgcgaaatggatatctgttctgtgatttacttgcatgtgtttaatggtctacgtactcgatccctagtatacaatgtacatcatacctgtagtcatcatctcaatatccaatatccatttcaactatgtttgcacggtcatacaattccgttgtagtccatgggctgcttcaagtggagtgttccagaaggcgacggcgatcaacggaagaaaggagccccttgccaccatctgaaatccaggacaaatgcaaatccaaatgccacgagcgaaaccgcccgtggcaaaagactccgcccaaataggacgggcgtttaatctccggccccctttcgtcaggttattggtctattggctgtgatcgggactagacatggatgttcgcgccatgttttcttagccccgagtaatcatgatgtcgagatgtgtttatattgtgggtcccgccacctgcagggcgagggcatctacacattggggagttgggcgttaagaggcaattgaagggtagctgtagttattactccgtaaaggagggcaatgtgcttattgggtgggagatgggatcggcggttgcagctgagtatcatgcttgcgttggagttagtagttggtttccaataagttggcagatagttacattgtatgtacactattctctcacagtcgtacagtaaccgtctatgctgtctccgtagttaatcatagcggtgtagaccgaaaccagaagccgaaaccaacgctacaacacctcacacgcccgaacacaacatctgccggtcgcagaaccaaaaaaagcaacaacgtcgcaaaaagcaacggcccggttccgagcgaaaacgagagcattgcttgctctttggacgagccagctgcattgctaatcctggggtacataactaccggtaatacattagtctatggtcggaggccaggcacgggacaccaaaagggacgggcgtcttatcacaatcacatatggcacatatcatatcacacgagtcggcagcttctacatcttgtcagacagcggacatggtacaggtacatgagactctctgcatgggcaggtttcgggtgagaaccgataacggatgtgatgaatcgcaaccccgggctttctatcaggtgattggactggatgcgggcaggcgtcgatctagggagctttgggtagagggttggttgctcaccgcaatgtagagtacctagacaacataacagacacatctcaactataacatataccatatacaatatccaacacgcatataatatacagtttgaatccatcactcggatcaatccttggcccttgcctggtatatgacgcaagtgagatccaaacaaagaagtgagattgaagactcgacgaggcaactttatgtttgcaggggctattcttaccggggctgtgcggagtactggaactatggagtacatctccgtgcttacgagagaaaggtagcccagccacccagaacatagaacggaaccagaacagaaccagaaccagaaccaacagaacgaggtcgacctcaagaatagcaccaataataatacgagcttcctccaagccgtccgagaaggtcaaggtacattagcgccaggagaagcagatgaagtgtatggcccgtgcagaactagtcagcagggaagcgccaacctccactggccctccactggccctccactggctttagggggtttctcgaaaatcgaacggttcgggcaaatggttggccatagcgcccctccatcatcgcctcactctcggacttgtttagcgtgtctagaccaagtacggagtagtactcggtggggtgtgggatagagttgggtgtctgtgcaaagacggtgtagaagatacctggtctcttcataaccaacagagaacataattagttcagacagatgcatcaatcattccgatccatggtagcaaaggaggagtagcttggaccaagatctcaatgccatagctttgcggggctggggcctgattggcagaatgtgagtggcgggtgtgttggcagtgtgtcgcagtgtgtcgcagtgtgtcaggaggtttcaaggcagaaacaccgttggggggaacaggggttgggatacgtggataaagctttgccacactaggcccagaacggaacaaccttgtgcagcgtggaaactggattggggggaaataggagacactctgcagcgtccaggtcgatcgttatgatcccatggcccaatcatcggttgtggcggctgcaggaaagaccggccgaggtctaatgattggtccgaccacactcgggcatgcacaccgcttcgtacacatggcctattattattttgggggaataatctggtttagtgccactccaggtgccactccaaggtgtgtatttttgtacgcatcatagatttaattattttgattttgattttggttttattgtgattttatttaattccttttcattcgatcctttcctctttcggtttttaatataatttccttttcgactagcgcccttttcccgtttgttttattattgttcttctcgaaccacgaggcggccatctgcctgatacatctctataataatcctccttctctctcgacttcgcgaccttgtatatttcacatccctttcttctacctcgactccctcgccttctctctttgttttgttttcatccttgtatttgttcttacttcctggtcccttgtgcaactctctccttctctcgacgtctatcaaacacaaccagaccggaccaaacggacctagatcggaccatcttaaaaacaccccattggattggaatggatgccttttgaatatccgtggatttagtctcttaatctccctggatcagactctttgcgctctctctcttatctcactctttcctcgtctcatccgggagaggaccattggatcccctctacaccaaggacatgtacccggcaatgctacccacaccaccaccctcgccggtgccccgacgctatgcgcccgaagatcgcctaggactcgtattagccaaccggctggaactcaccagagtcctgggcgtcggagcctatggcgtcgtttacaccgccgtggacattcacaccaacgaggtctatgccgtcaaggttctctgcaaggatggtctggatgcccgccaactcaagttccagcagcgcgagatcagactccaccacctggccagccaacaccgcaatgtggttcccttggttcgcatcatggattccgtggattgtacctacgtcgttatggaatattgcccagaaggagacctgttctcaaacatcaccgataagggaaactttgtcggcaatgactttttggccaagagtgtgttcctccagatcctggacgctgtacaattttgccatacgctgggaatctaccaccgggacctcaagccggagaatgtcctggtgaccgaaaatggaatgaccgtcaagcttgccgactttggcctggccacgactgattattatacgaccgactttggatgtggttccaccttctacatgtcacctggtatgcctcaaccaccctctttactatggccgtcgctaactttacatgtcagaatgccaacaagccaacgctcgacccttgtcctgctacatgtccgctgccaacgacgtctggagtctgggcgtgattctggtcaatctaacctgcggtcgcaatccatggaaacgtgcctcgattgaggattccacattccaggcctacctcaaggaccccttcttcctgaaaactattttgcctctctcctccgagatggttagtattctcagccgtgtctttgagattgacccaatgaagcggatctccatcccagagctgcgccagctcattctggagtgcccccgtttcacggagaatcccatggtcccaaccccctgggtgccggagcagatcgactacattccccagccccagatgccattgttcatggcccccatggaacccctgtatgcccagacctcaggctcgtccttggactccgcgcaatactcggccttctcccagtctgctgcttccgtcggttcggccatcaccgaggattactcggatttcgataccatgtcgcctgcagtctcgcagcagatccccgattacaagggcttcccttctgtctgcgcggaacccttctttcccgcggatcccttttcttacggcctcatgcaccctaacctccagggcctcgagatctccgtctaattgctccttgcctcgcagctgcatgacttcacgctcttctctacgtttcctctatcgaatgctctgcgggtacctcctttcgcatatctccgggcccttgctcttctctctcctccctccgccaccgagcggattcaaaaagctaccgaacaaaaagttgatcgcgttgatcatgatccactggactcggctaccagctttcttttcccttggacatatttctttactatctttcccttggaccacggctttaccctggcttaacgaccgcgaccttgcatggaccgtttgaccacagtcctgtgtcccttgcgaccgggtctcctttcttactgttttaatattcccaaatacctggaggttctttttacgttcccattttctggcgtgataatacactgggaagcatgatttgaagacacgcccctgggagggctgatgaaatacgggctcttgtttattcttttcggattggtgtatttggtcattttcacacggcgttgacgcttgttcgatttttattctctgttcatcttttggggacggctttttgttattttgacgacctaagggtgtgatctcgttctactcatgtgcatagacttttttttcgcattggcgggacatttcgggacttgttcccttttgattgattcttacgatatgatacctcggtgtggcaagagaggaatacttacttgataatctacaccactgcatctgcatttctattacagcaaattttttacaattcccgaatctcacctgcgctgcattccttgtaacgtttaacgtcttcccaacctcttttctagtacgctgttgtgcgacgttgcgccgtatgacaacggccgagactcgattcggcctgggatgatgctttgtgtttcgttgtgtgatggcttgcgccactgtgatatcgctggctgcctgagtggcacgcaggccgggacagatccattccgggttgacggtatgggtttggatggggttttacagtactaaccctgtacagctcgtggttgatctcatatacaacatgcagcagggtgacatatacatacacctcacaatctcaacacgatatatatatctatatacacatacacatttaatgaagcagatatatactattcaagatccagcccgcaacctggatatatatacatacaaaatctacatattccttccacctgtaacccgaatcgtctcaccattaacataagaaaacaaaggcgacgcaacacccagaaccgccctcgccgcctcaacagggctcgccggcctacccaggggaatatcagggtacgcaggcgcaatctgcttcttctcctgaccctgactctggtccgcagaggaaccctttttagttgcaagctgcttacccgggattccaagggcaaccttcgtgccgtcaggcgtggtgatgaacgcgccttcttccttggcggccgtcagtcgtgtagttacgaagccgaaggcgatggtgtttgaccgcacgccgaaggatgggccccattctttggcgattgtgcgggttagcccgacgacgccggctttggcgacggcgtaatttgcttggcctctatttaggattttaggatttggtatttagtaatgtagtaagtgcttgttgttgggcgaggaagagaagagtggggattggaattgggggctgggagttcggggtcgggtacttacgcattaccgtggatgccgctggtgctgctgatgttgatcactacgcgcggctcttggtctttgacccggaagtagggtgctgcggcgcgcacgagctggaagggcgccgtgttgtggacggctagcatggtttcccattgcttgtctgtcatctgtaattcgttagtgggatgctataactaacattgtagctggtaagtagtatatgtcccaccttgtgaataacaccatcccacgtgaacccggcgttgttcacaataatatggatcttgccattgccgaattcggcagctttcttgaccagttcggtgatgtagttgctgtcgaggacgtcgccgacgacggcgagagcgcggccggcctttgcggagttgatcgcgtcagcgacggcgttggctttttctatttgtttgttagatatgtacaaatttcagtgtgtaatggatctcactggcgtcgatatcagcgactacgaccttggcgccttcgtttgcgaagagtcgtgctgtttccgcgccgatgccttggcctgcgccggtgatgatggctacttggcctgccaggagaccggccgggtagttcaggtgctcgttaacttggttgagacggtcgaagggagccattttgggaactattgagtaaattgaaggtgggcattgggcttgtaagaggggaaggtcttatacaacctctcggctctgggatcgccgaggctcaccgggaccgagattgtggggtatacattgagagatggggtatgactatttattttgatattgcagttagttggttactttgcttactattctatcgtatataggcgaagtttttcgattttcttaaatagccgatctgcgtttgctgtccagcttgtgaatccaactctaccccccctagcgtatagaacaacaaaaacagttgacctcccatatgtgggtataattcagagagactcatcatgcatcactcgcccagatccacagatacactctccccatgaagtcgactgtaagaatgccgacaccgtagcttcgtagcctgcaataatggaaagcagcccttcacttctgggtgtgctcggaatatcaatatccaagtcgggaaataagccgatatgctccgcaggagaccagtgaccgatgtgctcatctaatagctttgattccgatgaactttcatggtccaacttggagatcagaacgtcggcagcattagcagtgcttttcagggccagcaatacatcccggcactgcaacaacagaccccggagcaggaagttgcgtatctgtctgttttcctcgtggcagatctcatagtatccgtagcgaatatcgacgccatgttctggccgcggtgcgcgagacgtctcccgcgaaacccagtactcaaagagctggagcgtgagattgagcactgaaatactgagcagcaggttcgtgctgtctttcgcgcatttagtacactgcaggaacatctgacaggcgcagaatgtgcatttgattgtctgcagactgtggtccagccgcaggggcatggatccagcgagtaggtggttcagccggtccatgtggaatagctgcatgtccacacactcgcatggcgagatcggatacggcgaagccacggagccggctagagacggactggccatgctgtcagccaggtccccggacagaaatgtcggcgtcacgggcgtatgtggatatcccaggccggctgggagagcaggacatggatccacaagatctgtgaatggagagctctccactgtcgtcaactgtccgggacagatggatgactctagagttgctgtgttgccgaagcttcggggactttcccagaagcctggctggtttgatatcaaacagacctacacgacggcacttattaaaaacatgccgaattggtcagaggaaaacttacgtcgttgtcgattgctgggtcgggaatatgactgccatagctattcccgactggcggttccatgtcggccataggggcaacgagccgactacctcgaaagctgcgcatcgcggacttctcttcttgcaactggcctagcttgcggagggtggctctgttcttgctaccctttggtttaccggatcgatttgcaaatccatattggcactgtaggccgtgacgcaggcaccgagtacagacactcttgccagacaggttgcatttcaccttggattgcctgcagttttcacacgcggttcggagcttaggtgtatctccgccggcatatgggctgccattggactctgcaagcattgtctgtttggtgctggtggacggggagttggtgtgaaacaggctatcccaatacgatataatgacactacctatagcccggggttcggtgatatatggatatagatggaaagaagggtaacagaggaaagaaaaaaggaaattagagatagaaatctaggatcaacgcgatgataccgcacacgtccaatgaggtagacgcttcacaccctctctacacccacttcttgtatatatataaacaagctcaagcttcagagaagtaatgtcactctggaattcaatccagtaccgacggcagccgcatacagaggtcagccgctgtgaaaccccagatgcttccatctgatcaaccacgcatgggacgccaagtggcaccgttatcccgaggttaaaaggagcatcttccctcattattctcgaatctgattcaacctgatctggcaaaagggaagttcttttgattcacagcgttcgctattttagaacattgcccatgatatgggaaaacagggtcccccaggagaaaccggctagggtccttttgttggccgtcacaccctgatgcaacatcgtaaacgccaatttcggggtcaagtttcttattggagaaccgaatgaaccttttactaacaagggctattggtgtcttgtcgctctggggcctgctctctggaacacaagtacaatagcctcgaatggacaacgctgggcaccatgtgaaatagaagtaaaaaaacatctctttctaatcggctgaccgggtctagtccctgtaagtaaattatgcgctcatcacttcattcctttcttcgtcattgtgtcattgttgcacatactaattcgagtcaccgtcagcagggggaccctttgacactcgagataatttgttgtaagccgcgccacgtacgctacaacgtgaacattccatttcatgctaccttttaaaaacgccatgagcatgttgtccaacctcgaacttgtgttgctccagaccctgactcagccgcgtggaatctgacaggtttcggcagccccgctgtgccgataatcgaatgccttcaacaaccctgtcagatgagctactgctgcgcagaccaccagcacgtggaatatttggtgcgaactccccacaatgtcgaatttcccgggcataagtcgctcaggtacgcgggccgcataaatcgcggctccaaggatatacaagaagccctgaaaaacgacccagttcagaccgacttgccgctgcatgcggtcaattccaaagagaagaaccccatggatcatggggaagacagcagacaagcccatcccaacaaacatggtagcgcggaacggacgccagcgtggggtgcggaaccggggagacgcggatacaatcacgcagcctagcccaatgatactgatcatggcccagtacttgtgctggagatcgggtgtacagtaaaatccgtagaagatactaggcacaaagcttcccacgatgagtcccacgataccgatatagtcgagtgcatttccaatgcgtgcaaccacaggtgaatggtttgagatggtgtgataggttgcggacatgccaagacagaaggcagcccccgcaaagaaacaggaaaaagcgaggatatcagaatcggccgcatcctggtaacgcggagaaagcaactggtagagctggtatgcagcgggggcagccatcagtgctggcaagaggtgggtgtagatattgaccgtctcattgtgaacgtaacccagcgattggaatgaacctaaaaatgaggacgaggcgggccgatatccagaatggatgtgatggttgtcgcgttgccagtgaggtagatcatcccaacgaagaagtcgttttaccaattcgtgagcctcctcgccgacagccgtcatcctcgtagtctgactatctaccgtcactttctgagattcaattgggcgacgttgatgaggcataatcacatgtgatatgcaagtatgcaatgagttacaggaatgttttgaagttgcccaacaaaagaatatgtaagacaagtcagcaaatgaaatccatacaaaaatcaaatcaaggaaaaagcagaaataaatatagacaagataaaaaagaacgagaaatttccaggcgttgggcagttgagggaaatcgtcctgttggggaaaagcctcggaaacaaacaagacaaacaccatgtcaactccacacttgattcatacactatgtcaacacatgtcaacacatggacatggcaaaatgagtcgcttacgcccagtatctgactctctggaaaatgtcggatttgtttcaaagggggacaagaagtgtgtttgacatgcgcactctcccgggtcaagcatgctaacattcgcagactgttggaccataagatccagacgcagtacttcgataatatagtcgatcgatacatgcggttctgtgcccatcactcgaaagacctcgatgcagccttggcctctcttccaacaagtccctccaacgatgcgacttccaatccgcccgcttcccggtcgcccttgaaatcaaaccccgcacagaagcaagtctcgccagcaacagagctatccacactccttctctccctccggaagctgcgcgaagccgttctggcaacagccacaactacaccggcagaattctcacagcgagttcacgtcttctccattcgcttgtctattctcgcgcatcacccaccgtcatacttcccctctctccgatacgttctggataaactgcactccccatctcacccactacccggcgctgaagccaacgaactggttacatacttgattcttgattatgcctgtcggcaaggagatatgattgcggcatacgaactgcgtgctcgggcgcggaaagagcattcctatcagtcgcagacagtggataaggtcttggctgccttgatccacgataattgggtggttttctggcagttacacaacagtgtggattctcatatccgcgcagtgatgaattgggctgcagaccgagttcgcaggcatgcgctcaaggccgtgggcagtgcttatctcagcgtgcatattagctggattttgggcggctgcaccggagacgaacagagttggacatgggagaaattggtcgagaaagagaagctccgctgggagcgggaaggtgataggatcatcattaaacgaccgaagcagaaaacccctcctaagccggagccaagtgcgtcgagtgcataagtcatgggtacatgagtacatgagtacatgtcggactggactttctctggacaagagcatttagtggcgttcttttcattgcatggcgttggttgggaaaacgtcacttcattaccagacggacatcattcacagagtataaattattattagatcgtgcgcagaaaggaattcaatggcccacagggcgaagtgattttcaaattaaagcgttataacttcagatctgagttcggccgatctagatttgtctgcccgatgacaggttgttttgatatcgtatcagctagccgtcccttcatgcgagttgcactgtcgctacaaagctcgtagaccgtcgacaaattgaatatcaaactaccaaacgaatggttggatgtgacctgggcctcgaggagccgacgagactaagaacaatcagtcaacaggttcaaatcaccatttaaacggctaggggtcaaatacctcatccagttgtccagtgtacagaagacacacagccagattttgagctaccagagccccgtccgtccttgtcctatcctccccgagaatacgccactcggccactgcatcggcaaagcgaccatccgacatgcttatcaaaggctttaataaaccagcctctttcgcttcattggcgtcaccaaatacctgacttgctgcgtccagatcaccaatccgcaaaagcaaaagtgccttcctcaactttgtgatgttcgactccggcccaggtacccggaggttatcaagtgatctcctggctgcatcgaaatcacgcatctctatgagtgcattcacgctcctaatcccaagatctgccaatcgctgtttccataattctcgctcagcttcagtagcttcgcttctcatgatctctcggcgcgcttcgaggccgatctcgtacaaaccaccaatgcttcggcgaggatcaccaaatcctatactctggagtctcacggccagtacgcgaagcggccatggaacaatatgacgaggatcttgttcatattcttcgtcattttctgggttataatcagcatcgactggagccgattcaagcttgagatcgatataatagaatgctgaactcaaatcttccagggccttcgattcctgtgctgcgagaactgtattgcccgacagatccaaacaggctagccgcgtgtagaaaagggagaagatgatctttatatccgtcggagatactaaagacgaagtcaaaatcgatgcagagaaatgcgccgcaatgaggaatcgaccctcggccaatagcttttctagggtgcctagagtagtcgacaaaggttcccctgggttgaggattaggaattcggatcgcagtggcagagggatttcaagatgagagagggtatggaagttgctatgccggagtagaaacgagaggtctttttctaaaggttcaggtagatcgtctggcgcaagcgggtctaactcatagaaggatgccccagaaaaggcgttgtcggcagcaagcattgatttgtgtttgacaggcgaggtgggtgtttcggggagagcgagaggactggatcgtgtaagaaaaaggatatagcggtggaaggcgatgtactaactcatccgatgcatctaaaggacctcttgtcgagctgcggggccgagaagctgcataggcaatcagtaagggacagtcggttaggtggtaatgaagtgagcgcttacacttggagatattccgaatgtgcttgcctggtactgaatccatctctacaacctttgaagtatttttgagatcaattagactgaaaagcagagcatgtatgctaatccattgaagtcgaagcaaaacacccgataagctatcggattctgccaggcggtggatgccggatctggcgacttggccgcgatctggcgttgccgaatgcaacaagctgtcagccatacgttccctatcttttcttttctcttttttttatatgatctttgctcggatcttttaccctccttactttattaattgacttgtgggttttcaacaatggcgaccgagaacaagtactcggtcattcttcccacctacaatgagcggaggaacctccctattatcatctggttgatccagaagaccttcaatgaggagtatgcgctcgctctgatatgacccaagagcactggggttaacttgtggttttttaattataggaagctggattgggaggtgattatcgtcgacgatggatcccctgacggcaccctcgagatcgcgaagcagctccagacactctatgggcccgaacacatcatcctcaagccccgtgagggaaagctcggtctgggtacagcttacgtccacggcttgaaatataccaccggcaactttgttatcatcatggacgctgacttcagccaccaccccaagttcatccctgagatgatccgaattcaaaaagagaccgacgccgacattgtgaccggaaccagatatgccaaccggggagatatcaagggtggtgtctacggctgggacttgttccgcaagttcacttcgcgcactgccaacctcatcgcggacgtcatgttgatgcccggtgtgagtgacttgactggaagcttccggctatacaaaaagccagtgctggagaaggttatcctcaaaaccgagagcaagggctacagcttccagatggagatgatggtccgtgctaaggcaatgggctacaaggtgtccgagtgtccgattaccttcgtcgaccgcctgtacggcgagagtaagctgggtggatccgagattgtcgagtacctcaaaggtgtaatgagcttgtgggtgaaggtctaaacgggccataccattggaactttggtgccccaatgcttcgattcatcttcgtctcaaatccaacatggtatcatgcctggacttgcctactgcccgtgctgtgatatacccctttctgacctctgttattctcaacccgtgcacttttgggtggtgtttgaatgacctgtttactgtcggtatcaattcaacgttctcttgccttctggatttcacatttatatgcttcaatatcatcaaccttcagcgctcagagggccttgaggtatcgtagaactcgatcaatgagatcctgctgaccttcggcatgaacattgtggctggcttcaggaacgatcccgctgtttgtatcccatttggcgcctcccgcttcgatggcttgctgccatctccgcaatagcttttccttgtccacccaatgcgggcaatattcatcttctccagaatacaaaaccaatagctttgacgtgataatgccctgcgtacccaccatgccaaaggtctcctgcaaacgcttatcactcaaatccgagctgaagagatcgtcatcagatgggtcgtcggggctatgaggactgactagactcaagaatctccgggcactaagaggcgtgtcggccggataagaaagcttcgcagtcaggttcattgggaggattgagtcgttcttatctgatgtgtatggatgctccttggccgagcgcacaagctgatcgtagacttttctgagctcgtcgggctctggagaagcatcgataatagcttgcagaccctctctatcagaggcaggcgcttgtagaatagcaccatccagcgcagggcggaccaagtgctgaatgccaaaaccaaactccttccgcggcaagggattcggcgaataaaggtagtggagtacgtcctggcttccagtcgaatgccccatgatcgcaatctttccggctgttgtcactgcaccgggttggcgcgacgccttgagatcgcgaacaaaccgcacacattgcccaatttcttctacatcgcgatcaaggcttccgactccccatccggcataggaggacgaaagtagggtagagaagaccgaccagtcggtgtcctctagagcgttagctagcttggacacatagggaacagtggaaaatccatctgtcagtccgcctatgaagataaggctgtttgtcatattgatcccccctgttggtggggtgaactcgaatgccacaagtctgggagcctgcaaatgttagcttgtcatggagaagaatggggcgattattagttacatattcatgtaggaaaccactatgcgatggcccgcgactagcatttgaggacatgatggaagtgtggttggtgataaggttacacttcgtcaagcccgaaggtgtggagggagccagttgacgttatccgattcgtaggccccggggcggctgggcgggccatatttgccctaccttattggtcttctatgatctcatgagcttaaaattcaggtttatgccaatgactttgcgacatacagtttataatgtcaccgagaggacgatctgtctaccaattgtaactaacatttactcctcaactcaaactgaagaatcgaaatcctattctaattttggtcttgaccctgagaagctattcaagattgttccaagcctgttaagccacccttctatgctcggacgactgatagtcctttcccaattccccattgaccgacctgatacttttcaccaacagtagaaaacccgtaaggatcaacggggttcgtataaggctctgataatgtcgtatagtatctgccaatcatggggtcgacacgagcctctcagacgatattccgtttatcaaatagagcagccgaagtcgcttagtttggaaggcttcctgatccgcgatgagaagatagacttcggcaatgaccttgtgcagactactcgcatgattctcaataatcttatcccggctttctatttgttttcaatcaacagggaaatcctacttcgcgctagagatattctccttcaactccttgcagaacaactcaaactatcgggagaggtgtaccgtttctcacttaatgccactgggccagctatctcgtgtaggacctcgcatataagctgctagtcatcgccgaaattgaagagattattgtcgttgaggcatgcccagtctgaggcatctttgaatatctcttcatttttctatgccttcagtgtctcgtcgtcttctaggtcggcactgtagtagaaggacaggcatgctatcggcatgatgaatccactgaactttccgacgaaggtcattgggcctccaatgaggaagaaatttctcgatttctctgttgagagttgagaagtgttagcgagttccaagttgatgatttgcagacataatggaacgtgcgatcaaaaacgttcaacagctagcccggtccttggagagatatttgctgcataatgaaaaaaagggttgggaggaaacaagaagaaaaaagcgaaggtcggagggttatatcgaagggtttagtttaggtacagtgagcggttaaggggtggatgtccaaatttatgggtgaaaagacagccgttcctggcctcaaaagcgatcattttaggtgtcaattctgcaagtggtcattttctagttctacaatgaggtatgtcgtactccgtatgtagcccacgattcgatgggtttaatcggttggtgcctagaatccaaggcaacagaactagccatcttgggactagcgtcaataccttgaccttcgtattgctgaagcttctctatttcctaaatcaaatagcggacgtctcaatacacaatattgcagctgcattgctcagtaaaacgtatattactgagctttggacaatttgacacgctttacgcatgcacatcactggtgtcattggctgtcgtcaacgacgcgacctatctaagcaagatgccttccggccgcaggtctggccgcctcaagggacccagggctctatacgttgatgatccatttaaggcagctgggatcagtgatgatgaggactccgctgagcaggaaattcctggcaaggggaaaaagaagcgcgccccgacagaagattcagcctcagataatgaatttgtcgctgggtcaggcgatgaagccgacgagggaatcgaggaagaagatgagcctgaagagggactagaagaggaattcggatcagaagccgatgcctccgaccccgaagaaatggagctcgacggcatcgaggatactcctcataaagagcgttcgatgtcgtaccaacaagatgcgagtgttaggaagcgaagagccgatggaacagttgtaccatccgccgaagagacacacactcgtggcatcatcgaaccccgagatcacttgtccaaaggcacctattacactctcacattcggttctgacgatcgagatttgatgccagccgtccacttccgaatgcgatggaacaagggtgtagatgcggtttttccatctcgctacacattagaggagacggagaagaagcctgaatatctatacgggcccacgtttggggttcacccagatgatgttctgaaagaaagcacccgcgggtgggactggtattatgatggggacattggtgagaggttccggaaaagacagcgcattgagacgattgaagagtcaatggcgttccaaaattacctacccaaaccagatgcgcgaaaacatggcattttactaggaccccatgataatcaacaactcttcgagctgggctatcatgagtcttttgactttggaaaagcctgggaaagtccaaactccaaaaaagactcatcaggagctgagatcaaaaggattcgagaaggttggatattaaacatcggccacaaggcacattgcatggcttgggctccaaaccaggatggtctgactcagtatcttgctgtggcggcgccgattacagaagatcagaaaagccagtacaaatccgaagatagtgagcctctctcatcgtttcaaccctcggagcctttccctagcgccttacagatttgggagtttaagggcaaaccgagtgaaactcttacgatggctctcgatatggactccaaaccccgccttcggcaagttttgtgtgctgactggggggacctgagacgcatggtatggtgtactttgccccggaccgaacgggtggaggacaaagaagaggaaaaagaatccattggtttacttgcaacagtttggggggatggatatgtgagagttttggatattaaaacaggtagagggtcacaagaaacagaatttcgtgagtgtccctttggagagatttcacgagtcccgctaatgtgcaagatacagtcaaaatcaaatcccctgcgtttgaggcaagaccgccatcaacagtctgcacatgtgtcacttggctatcccctagtgatattgcagtgggctgcggtaacggctttgtggctctctggaacatcgaaccttcctccatgtctgaacctctaccttttttctatcggccactccacgccacctacatactcagtatcacatcggcatacccggtccatccccaattagtcatcacgatttccatggatggcgaaacgaggatgtggtcggtcctcgatccaaccagcgaaatggcatcgacgggccgcatgcgaggagcctctcccttcatcagctattctcccatctgccagtctgttgttgccggggatgaaaacgaattcgctcgcgtaattccaattcgacggttttttaccactaccaccattgcgcggctcagcagcaccatctcggctatggcgcaatgcagttttcatcacccctgtgccctgtttggcagtgccgcaggcgaggtcgtaggaacgaatcccttccgacgagttgtttacaacaaggagcaaatttggcagcagatatggttcacacatgaatggattcctacttctaagacgaacactatgggcacaagtcgatttcatgacggatatcgggcagagaaccagaagttggcaaagtacaagctttttgagaccaaccccatcaatgggatggggacctcgacgatttacgaggaaaatacccacgtcacagccctcgggtggaaccccaaccgcccttgcgcagcctgggccagcgctgcgctggggtgtggattgctgagagtggaagatcttgccatctagtgacggcagccgtattgatcaaacaggcgatctgctagatttactactaatcatgacatgaggacatcatagtcgatctatgaaaagaaactaggtgacagtgaaacaaaatatgccatgttagttgtgtcagagtgggcccccagccacaccaattgcttacttaatgtcgctgtgggaaccccaccacaacatcgtggttggcagatacgccatgtgggttcgatcagatctcagctccacccaatcaaagctcatagaagccaattaaaaataaagtaaaaatataacccatggctggattgccgtcaacccagccaccgtagatccccagccgcctaattttggcccagtagaagtacacttcaccgtgatagtagatccttttcgtataacttttaaacccggacttgagttcttctctttcattctcaattctatcttctatccaaatctcttccaacattgcctatatctccattcaatctcaagcgtctttcccttctcaattattattgcaagcttcaatttctctctgttatcatgcatttctcttctgctgcagtcctcgccctttgctctatcagcgtgacctacgcggcgcccttcgccaatcccgagaatgaagatctcgctcgccgtgcaacctactctgtagtcaatgccgatgaagactgctcttctagcccagtcgcacgcgaagtcgacactgtcttcgaaacctccacagttactgctcctgatgccgacccagtgcccatcactgtgaccgtgactgccacaccttcaagcgtgacctctccctcaaccgctgtggctagccctacttcgtgctgggagacccctaatgttcttccaaccgctggctcttcgtctttcttccgcaggggcctgagagccgctggtcagccggctatctttgctcgcgaatactctagctctttgctttacgcgcgcgagtatcccaccgcctctgcctccgaatctctccatgctcgtggctggtactctgctgcttctggcactccttctattgcgacctctaccgcttcgcctacttccctcgtggctcgcaactttggtgattcgtactcttccgcttgggtcccaacctccagcctggtcactgccactcccctcgttgctcgtggcttgtactcttctgctgctacctcatctgcctcagcgacttcccttgtggctcgtggcttttccccttcttactctagcggaaacatccctctctcccctactcccttcgctgcccgcgacttgtacgcttctccctccggcacattctctatcccgagcatccctacttcagctgctcctctggctgctcgtggcccctatggctggtactcttccgctctcagtgcctcccccattgccacatcttctgcctctccagctatcgtggcccgtggtgcccgcagctggggctcttctagtgcatccagcaccttctctgcgtcggctactcctgtggcctactaagacagaccacatgagacaacggttttaaccttttgcaaatgaacacaagcaaggcttttcatgaagtgatgagatccttgttttatggcacgatatgattgcaacaacgaaaaagaaagattgtgaatgacttgatttatccccattacggctttggggatacatatttgactggcgtttttactggaagggattttgaaataactacaattcttcatgtgtcttttacttatgtggatatgggattgggttgcttttgcgttgggcctacatagactggatttgaatattgatgggtcccgaattacatagaatagttgcacgatgcactggaaataacaaaatgaaatgaatactttgacaattcttttgatatcatacttaattctccgatcaagagccctacataaatattgtcgacaatctcattggaaggctagggcagataaagagcttatgtaacgcggtgcgtggcggctgcacggtggttgccccgagagacgcagcggtaaacatgcatcatccctccgctcaccttcaacttcgaaaccttatgacctccaaggaagggtcttttgtgttcttacatttttttaaattatcaactgttattgtttcttattttttgttccctttgtacctgaattcctacacacttcgattgcatgcgcaagggctggccgagggtcaacatcgataacaatggggacagacgggcctacggtctgcatgtcttgtatgtggcattacactcgtgtaaatttgcactcgctgacaattgttctagttgccaacaatttctggggcaaagatgatgcaggacttcaaccaatgttggaccgcgtgcatgggtcaaagatcacaaacgacgaactgaaggttttttacagcggtacgtgacgttgacgcagccgcaataacatcgaattctaacatcttgttagctcgagccaccatcgaagatgaatacgcacggaaactccaagttctatgtcgaaaggcgctgggatcatgcgagactggatcgctccgagcctcactcgacgttgttcgtggcgagactgaagctatcgctaaggcacacgccgcaattgcaggacaaattaagacggaattggaggagccacttgctgcgtttgccagtggtattaaagagcgacgaaagattattcaacagtgcattgagcgcctacacaagaccaaaatgcaacaaacgcagctcgtcaacaaagtaagtaaagacggggagtgatgagaggtaaaatactaactctatagactcgtgatcgttacgagcaggactgtctccggatcaagggctaccttgctcagggccatatggtcatgggccaggaagagcgcaagaacaaggccaagctagagaagacccagatccagctggcatcaactagccaggaatacgaagcggccgtcaagcagctcgaggagacaactggtcgttggaataaggaatggaagtcagcatgcgacaaatttcaagatttggaagaggagcgtctggacttcacaaaaagcagtctgtggacctacgcaaacattgcttcaactgtttgtgtcagcgacgatgccgtatgtttattgtgcccgggtttattgtgcaatactaattcgacctatagtcatgcgagaaagtccgtctctctttggaagactgtgaagtggagaaggatattatgttcttcatcaaggagcgaggaactggccaagagatcccagatcctccccgattcatcaacttctgcaaggatgatgactcaagctctgacctagatgaagctgatggctactcggtagcccaattccaacgcactatgaaccctgcattccgcacatcttctcctcagccttcaaccttcgaatcacaccatgacccacagtcagagctcgcggctcaaataggacgacctactcttccagccgtgaacaatgcgccgccacctcagcagcaaccgctaccgtcacaacagcagccacccccacagcagcagccgttcatgccacagcagcctctcatgcaacagcagcctcttatgcaacagcagcctctcatgcaacagcagcctctcatgcaacagcagcctctcatgcatcagcagcctcctctgcaaccacaacaacaaccgccgctacaggcacagccccagcaacctgcacctctagacttccgccgtggtggcgcgccgcctccgaactacgaccccgagcaacatggagagatcggagctgttccccacaacgcataccccacagatggtatgaccatgttctgtcgtgccgggccaccctcagaacgaagctcagcgaccagcgcatatcgcccgtctagccaagactctcagagcgaagtttcgaactcaacctctatctctagtgtcgaggaaacacctacgaaaaagtctatagtaaagtcaacaaacagtgtgccgatgacagcttctggagatgacaaatcaccaaaaaagaagagcgctttcttcagcaacagccccttccgtcgcaagagtcgacatgacaaagaaaggcctgttgtttcttcacagcagggcatctctccaacgtcgctcgtttcacccaactccacgtctcgtagtggttgggactcgccgacaaaacaaatcagtccgacgaagcaaatgagcccacccaaacaaatcatcagcccgcccaagcaaatgagcccacctaagcaagtgagcccgcccaagcagattagtgcacccaagcaggctagcccaaccaaacaagtcagccctgtcaggccttcgggaggcctgccgggtcgtgcctctggcagcccggagcctgttgaccctcgagccaacttccagctcaatgtggggaacaatgtctttgacgtggcaaccccagaaaagagctcaccccagaaaggatcacagccgaatcaggcatctgaagatgacttggaccctatcgcgcgggctctagcagacctcaagacgggcggcaagcagtcagccactcgggtgtcggcagatagatatcacggcatctccacacccactccgtcgacatattcttcgacctatggtggcagcagtgttagcgttgctactccgcccccagcatacaatgatcccacagtcaagcgacttggcgcacctcaaccggcctttacagcaaagcaaatgcacaagacaactcagaaatatactggtcaaacccagagcatgcttcgaggacaaaacaacaataatagcatggggtctagacatagtggtcagacccaagacagtatgggatctagacatagcggtcaagaagccacccgagctagatcgccagcaccgagacggagcgtcagccctcagccccgtgtggatactcggatgagccagaacagtggcaggggcccgagccctactccgagtagttaccagtctaacagcatgcgaagtcaatacagccgatcgcccactcctcggcgtactcaagatccgtacactccaaacgagtatgctcggaggccctcgcccgctgcaagccaccgtgctgtatccccgaacccccagttcaggcagcaatctcgtccttctagctctggtggcatggagctgcagttgtctggaaaccacgatatgtacggttccagcagtcccggtggatatgctagctcagctcgaggaggcagccgcccctcatcgagttatggtgaggctcctccgcctgttggccgatctcggagccgtactatggctgttgcagagcctggacgtcaattcagccgtgacggccgcccaatcttgcactttggtaagcatttattcctcctcttcacaatgcgttgttagtatctaaccttagtccaacctcacagctcgtgctatgtactcctacaatgccgccatccctgaagagctcacctttggtaagggagatgtccttgccgttctccgtctgcaggatgacgggtggtgggaagccgaagtcaccaacgcccgtggccaccctggtcttgtgccaagcaattatctgcaaatcatttaataccccattgtactcacgacccgccacgaccctcagaacattcgtcctgaaggtgatgctctttttcttctcacatagataccacgcctttcgtctactttccttgcacattggcgatttctttctggctcagcttctattttgcttttattctcagcatggtgctacagtcccgtcttgacatcactaaacagcttgtttaatcttatcatgtttttgcggatgtttttggacactttagcgtttctgttctgggaatctttttactatgtgcttcatgtgaatttgttgaattcttttttttctgtctttttcctttctcgacagcgatccagcgaaattgtctgaaccctcgacactctatggtcttttatttttattcccgcttcctgccccaatcttcatcatttgcctttctctatgtttgtacgcttttatggaggatatgacgtgctttgctctaattgatgctctcctttctacgatgtatttcccatgacatatgtaagtagtggcctaaattgatttgaagacagtcgtgtatacttgattgatgattgcagtccctcggactggatgcgatagacttttgatttaactcatggtgcaggtacgttccagaggtgctagctttctagtaaatcttatgtctgatgttttaaaagtcattttcgactcaatgccaatgcttttgttatacatatctttcagtctcaccattctatatctttaatctttagtagaaaacatttccgacactcggtatccattatctaacagtatatctcgatcaagtaaataaaggtttacctacttaggggcttgtgagtagctatttcatttagggctgccaatgtgctctggagtgtttcctgttacccctcttcgagactgtcttcaaagcctcatgatctgaccgccttttgacgaaatccagagaaatgttcaattgacttgaatgttcttcagcttctccttcttctgcttcttcccagctataacccaccatgttatcaggtcgcatacgaccgcgtctagtgcgcgtgaccacgtccatcgtacggacacataccaagcgttccttatcaacaaagcacttctctccaaactggaaagcttacattgcgactgccggcttgatcagcacgcccggaatctggtggttgaccgctgcaggggatgatgcaccccgcctcgagtgtccattagcggagcacttggccccggagccgggtccctccaaagaggatatcacacatatgttatcgaaagaggcatactccttccatgtcagaaatattacaggtgtcaccagatacgacggcgcccagttggcgtccaatagcccctgtgaggaccggtttattcatggcgaagtttcttcatcgtggaatgaaaatgatcaatggatgtcctgggctgtttttgatggacattcaggttggcagacagcggacctattgacgaagcaactcctacctttcgtgcgacgcagattgtccgaagttaactcaccggtatcaaatgagtcagtgcagcgcgctatcatggaaggattcgtggacctcgatgattccattatcaagactgcaccggacacatctaagagcaaagaatcattccaagacaaggtcaaaaaactgattcctgcttacgctggttcatgcgctttgttgtctctatacgatcctatcacaagcacgctgcacgttgcatgtactggggattcgagagcggttttaggacaaaaaggagcagacggcaagtgggagacaattcccttgtcagttgaccaaactggcagtaacgaagaagagaccacccgcatttctaaggagcaccctggcgaggaaaacatagccaaagatggacgggttcttggaatcatggtctcaagagcctttggtgacagtctctggaagtggccgttagattttcagaaggaaatgaagcggaaattcaatggtccagcccctctaacaccacggcgtgatattcgcacacctccatacttgactgccgagccggtcgtgacaagtactaagattaatcctaacaaaccttcgttcttgattatggcaacggatgggctatgggattatctctccagtgagcagggtgtcgacttggtagtgaactggttggaaccacaacggacggagaagaatacgaccgaggagaacaagacagatgggaaatttgacttcggcagattctggacagatgtggactggcagtttgagaaggagagaatgacaatccaagatgaaaatgcagcagtacatctgatgcgtaactcccttggtggaaattaccacgagttgatagcaggccggcttgcctttgaccctcctttgtctcgacgggtacgggatgatatcactgtgcaagttgtcttttttaataccgagaagtgaatatcgatttcttggttggtctgaacatagaagtgtacctctaaaaattgtacctccgaaactcttcgggtgacggagaccaaataaagattacgaccatcactgatggatgtatcactcattttctaacaatttccatcataaattcaacaagaagagcctaccgagaatgcctgctatgtctcacctgattatacagatgccacagagtaatggaggcgttgctttgcgtactcgctcagatgattcctcggatgattcttcagatgaatctaccatgtggtgggttctatctggcgttctttggggaaccctcggcggttttataattttggcgacattccattattttagaccatttggttgtgattgtgtacgcaacatttcgcttgtttgggataaaattgctcggtaagtcgtgagcgatgataatatctctttctatcggtgtcgaatccaacagttctcatcaaagaaaagacactaacaggtcctgagatctagtgatgtttgtcgagctggatatcgaatcaaagatggcgtgaaagatgtattccaaaatgcattcaaaagggtatatcacctggctggtctaaaagcagcgcctcaggttatagccaacgaacaacaaactgcaccaggtaaggaagacctatccaaactagatactgtcaagctactgattagtactgtctttgttcagagcccatcgagatgcaagatatcacggtggaatatataagacatgaatctgatagctcggaagatccacccgactacgaatactacgggccacctgaggtgcccctgcctgtctacaaacgttaggagaactagaactaggtccggaagaatggagaggaataagaatgggctaaggataacaggatagtgtttttatattgcttgacttggcttccctgttgtgatattatggcgaatgtgacaccaccatgtggctctctatatgtttagctggtaaataaatagaatcaaaatgtagagagttgaaataagaagagaaaaatagaaaatgtagccattaagcatttaaggtaagaaacactaggtcagtggcattcgagttcttaaatgtccgcttacagtagcttcgatgcggagcgggggcaaggagctaaggggaacgaactattatttgaaaataaaacactgtcgagaataccatgataagtccgcttaagcggccgactattcttgtctctatagtaataaaaaaccagcggtgagctagggaaatctgatacggcgcactagcggttggagactggggtcttactcgcagggaagattagcatataactaatatgacaaccccactaaataggatatcgaccagaacttcttagctttaactcaagcgtctcatcctgctagtcttctttcagtgactgatgggttcctcgtagttcagttactaagatgttatagaaaagatcacgctagcagctggctctgcccacggataatgtacttgtctctatcagcactctttattcctagaggtgtatgccgaagatgaattattatctgaaagaggaccacggtcatcctgacgcaaacctggagttgagtttgtataacctaagacgtgcatttaagcattgactcgatatagaccatcctcacactattctctatcttcataccttcctcacctttactgacatatttacttgccaataatggctcctattcccagcgacaagtctgattcagcatcagaatcaccaattgatttggctgctggatatttaggggtacttatactagcaatgtgtgctctattgttgctcatgcttgtatgcgccatcgtgatccggtatctatgaccaccgagaactaagattgaacatgatgatcttataagaaaggcaaactttacagagaagctgatgctaatattactgtcattctgctagacatcatatattgaatataatcggctgctggatcaagaactgctacatccgagcaaaaacagctctcggcacaacgaggttgaaagcaaaatctttactcagcacaatcacgctgaagaaaactagaacccaaagttatggtgagacctacaccccaaaaaccaactgggtgctatgataatgtctaacctgacatgccgttatcatacagacccgaaaaatacttccgatgtgaggctgcagtacttggtccctccccctaaagcggctcataccaccacaactacaatcgatgattctccttgcagtctgtagacaatgggatttgcacacgattctcaggggaagcaagactctacgggtgaaaggatcgggacatttgaggtgatagattattctagtaaggcaattaccaattaccaatgctgattgctatattcacgtattcatgaagaatcaattcgctaccattggcattttggaaacattgggttgagtgagataagatattcgagatattaaaaattctaaaatttacaaacctggaataagataaacacaaagagaatcattcacaacgaatagcctgccgaagaaccaaagaaagaagctagcaagtattgacagacaggggtatatgaagaaaagacaggcttcgcggtaataattccagcacgtgcaattcccgaaggatcatattcattcatcatcaacaaaggagttagctagacggccaaaaaatgggacttcaaagtggtccagagtatcaactagaatgatatgataagtataagatctatctttcctgccaacgaacagctcagctgtaccggcagctcccgtgaagaaccttggaagactcaccatctcggtaagcatgcatgctaaggaagccgatcaaagcaatatcgataataaacaaaacccaggagagaaagcttgaccagcagaacagtaggtgaatgatctatttggcatgtgagcgtatgcagtattaagagggattggaatacacacaaacatggtagcaaataacatggacgattgccaagcatggaatctacagtagatagtcagcaaaccgggattccaggttattcaaccccttaataaagcctattacataccgcacataatcgctcttatgttcagctagtagtaggaatacaccccccgcgggaggcagaagcagatatgctagtgccgcttcgatatccatgcgaatgggtagacttgtttcaaaggcccctaagctcacatggccaccctcgatgtctcgtccaaatcccgtgttgccatatccgttgctagcaaagtgactgggcgagggtaggtcggtcgaggctcgcggtgagcggaggattggagatattcggtggctgtcggggtggggaggggatagagcgcgctcaagctccggggattgatcttgataaggggcgaagttcatcatgttgtcataccttgaaaggtgaatgacggaatgatcttcgggcatcaggggattaatttggagtagcatctccttatcgttatcagatcgcgacgcgtaactgcccatctgatgcctcaggcgacaatatataaagtaagggtatcatatcattcagtatcttcatagtcaaagatttattatacataaactagcgcagtccatctagactctcccccgaccgcgagcaatcccgctacctcgtgcaatcccgctggctggccgttgggttgttgtcgtagaccctcgtgttgccgtgcggcttgtgctgacactgggcgttcttcctaatccagtagttcgaactgtacccctcgtagttccacgggtgcctcgagtaccccgagtgacctgtgcgcgtcgtttttcgatttcctcggcctttctcgctgctgcttctcgctgctgctgaagtgcctgttcgcgtctttctgccgcttgctgtctttggatcgcttggttctcgatatcgatcacatcctgagtagcgccttgccaatcggggttgaggatcagtcgctgattatgctcagtttgggagagaatgcgagtccacgtgttgaggagtgtcgaggccgacgtaacggtttgtgagaccgtctatacggataattagccaaagtattgaccgtgcattatgagaagaatatattacctccatgttccctttggcggaatccaaacttgccagaagcccttctattacttcgttgatattccgcacaccttgtaattctgtccggagcgcagtctctcgagactgttgatgatcaaagagaggatcctcgccatcatgggaagctcgaggttctagtgtaggtttctcatcggaggttcttgggttgatctttttgcgggtcactctcttggatggtgaattccagaggtcctctgtgtcatcatcagacagctgaagcctctccatttcttctgctgtggtgcggaaagccatgttgaattttcagagcaggagccgaagtatgtacaagcaatctcgatagactgaacacctgaatgggcttagttttgggataactgtgagtccgaaatagttgaaggttaattgacagccgatgatcgacaagactgacagttttaagataatcaaacaagcaattggggtagatcgaaataggaagtcaacattgtttgatgcggggttttcagccaccgcaattatcgggcggtgaagatacccggtggctgggcgacaatcggctttcataacaacttcgtcctcccttcatccccaacttatcgattttagtttcatcgccttggacaattggatatctgcaagatcacgcttcataccttctttagacttttatatctccgggtgcttgcctgattttgaatatctcacaagtcggacgtggtacgcccttgattgaatcaacgctccttttcgatactttatcaaaatcgccaaatccagaaaaagccctgggatagattgtgatatactatttatacttctactcgaaagatcgcaacccttcgaacggttaatcaatcgtgattcaagtcaatatggcgtcaacaccaccgccgccttctccgtctaagcttcgtgtacctagagcaccgcgacatggggcgaagcatgacaactatgaaccttaccctacacgttactctgctagacttgctggtcaacgagcgtcaagggtccaaaccacaccgcccccaagccacccaagcacatctgccaaacatggagcagctaaaaggactctttcgccctcatcacctggcactaccaagccctcgcccaaaaagggtgcacactctcacagaactgctgcctcccgaatttccccctttgattcggaactttcacttccccgcacttctgcacaacacacctcacgttcctctgcagaacgagctttacccacaccagctaaaacaccttcgaagaagaaggtaatcagttctggctcttctacatctcgctctctgtttccttccacatccactcccaaacgcagaaaaatggaaacccccaaatattctgccgcagaatccctggacatcttcgtcgatgagcctttgagagcgtacaacattgaaactgccgagcaagaattgggtatctccattcatgaggactcgcgtgatcgcatccctgtgatcggtccactttcgactgattcgttcgttaccaaggcacgagcggtcggacgacctgctactcgctcaaccaccagccacaaaaatggagcctattttgtccagtaagtcaaacctcatgtacccgtacccaccatattcgcatattctaacttgtaatttaggcgtgggaaaaagatattcaagcgctttgacgacatggaagatgagggcgaggatgaagacgaccttggccttttcgccaaccgccctgacctgttggctgataaccctgatattctcaagagtgtgaagcctttgcgacgtggcgacatcaagcctcgtatcctcttccctgagcccgctgagcctaccgataagcacgctgaccctaccgatggtgcggaggaggatgtcaccgatgtcgaggatcacgagccaacgtctccaactccggcttatgaagaccagacatatctgactcctcccgtcttgccagatctatctaccccctcctttgaatctgagacctcatctgtctatcacactgcccccgttagacgtactggcctccgtttccatcgccctgccgtggacgatgtgacacctttctctttttctgaggacgttagtttcggctcttctaatggggatcaggctcgatcccgaggcctctctgtcagcagtggtagcagcctcctgaagtactggccgtctgtcagcaggaagacgcgggaggccgaggcccgcaccgaccgcaccaagcgtcttcgcgacgcgcgtggtagccctgctccacgcacccgacaggccgcgcgcgcggaagcatccgcggcctcgaccgctgaggcatctacgtctgattcctaggtctccaaggtgtcatctttttttcacgactttgcatcattcagcgctttgggaatttttacttttctttcatttgcgtgcaccggacttggcgcgaagtgcgtgccaatcttttgtttgttggttgcgcctgggagcaaccttttcgtcggctttcttttccttatgccgtcttttctccccacgacagccatcttgtaattgcgcaggccgctgggtttctcttgtctctttgcgttttgttgtttcagtggcgcgcgcgggcttgggagtcgtgaacactaaggatacctcatgagaacatgtattaaattggaatagcggcgtttcctcctgtcttttcatctacgctcttgtttctttctttctttctattgtttctgatggtaccggcgcattcgtttgttgtttcattcatctggaagcggtttattggtcatcacgggaggaatcatagtaaaacgggacagctcaatagaattcaggatatctcgaaacttttcctgtaactcctggtattaagtccctcgcaaaggcatatttctctgtcgagaaagactgccatttggtgtagtcaaaacaaactttcggtagtagccgggtgtacttatccacctggacattgtagacaaggggacaatacaaatacatgaatcgtcacatcgattcactacaggggttgtatctagccttctcctcgacaaatccaacaaaaaggaaatccgcccagtgcagccgggacatgctttttattcgttacagcgttataggtattcctgtccacaaggagaactcctaggtcgattagtgaccagatggatatcgccatttgaatccgtcaaatgaattccaggtcatcgtcatcgtcatcatccaagagtgcctgtttcccattgagcgtggtctcagctggcgcacccaggctctcccggccagcctccctgataccccttgaagtgatgaaccgcgtcttcttaacaccactgccatggggtttgtcatgagcacgcttcattgggcttagacggacattcttggctttgccaaaggtggtcatatccatgccgctggttgtcgtggggctcttgggcaaaggggtgtctgctgctttatctttgttgggactctcgttgctggtccttgcgcgaaggtactcggcgcccacaccaccgacacggccggtaactagcttttgggtgatgtcacgctctcgctgctgggtcgcaagacgtctgcgcattcgttcctccttgctctctatgccgcggcctatcatacccgaagcaagaaaaggatcgtcatacgaatcaatcagatttgccgccgagtctcccatgggattctggaacgaacggccagccccgcggtttctggagggcgccacatagtagagcgattgagaccccatgtcatactgagggccatcgtatctcatgtcttgcttgaaaatagctgctcgcctccttgtttccccaaataatccggtgcgcgagccagatttaccaccgggaccaagcatacccgtatcagcattgactcccgagcgttggccctgggtgcgtcgaacctggatatcaacgtggaagtcacagaactcggtctttcgaccatctatccaggattcgcaggtctttccgtcttttctcacagccttgcagaacccaatatcgcgtgccttaccaatttcgaggaccttgtcatctgatgaggacaaggacaagctgaatctgtttgtgtccagcttgtgctttggtggaggcatgatggtggggttcagaattgcgatgagagtcccttccgagattttgtaataacgggggaaagcagtgtcaaaaaggaagaggtcaatagtccatttcagatcggtcagggtaatggccatatatctgttcgtattgtttagtccatcatcataagggttattttctttagccgacgcgttccccgaagctttcttgtcccttggggcggacttggacgcaacgacgccaaataccacaaagtccccatcgatgtcttctgggagctcgaatgcgggtgccttgacggttttgagtagatcaggaatgcgcaaaactttcgtttctgcgagtgtgcggctcaagaaagaatgtggaagaacgcggcttgatagatgtagcgacgaataggactcgaattttgaagaatccggggccgccttcactaaagcatcgtctgtttggtctaagtcgtgagatgaacttggttcttcttctgccgtatgagttcgcctatgtagatgagattgtctctcgttgtgaccactgccctcggttcgtcgaacattcggagttgtgttactgcgttgtagaccggatgggcgggattgtcccatagatcgaagaatatcctcacgactaaagctttccgtcggccgctcttgtgacaacgacggtggaggggaatgctttgtatccgaagctgcagctttgaaagcctctaactctgacttgtcgacttgaaaagccgaactgcggttggcctgattggcctggaccctttctgctctctctagccgagatttctcagccgccctgccttccgccattctctcgctgaaagattttattcggttgattcctgctgttgatgaaggagaactctggggccgtgaggcgaatatgtcattagagcgaggcgcgacactgtctcgaaatcccatgtgactacttggtcgagggccgggtcttgagcttggaggtcgtttcaaggatacatcattggccttccagcccttatcaatgcccatcacgtacctccgaggcgatattgggtcggtgggaggagcttctcgcctagtaggtgatgccggaacctggattccatcgctgctcgttctttgtttcccccccttggcgattcttggtgttgcaccgcggtcttcttttcgcaaagggcttattgcggagtttggtcgaacatcttcgtcgtccaaattcgaattagaccttccgcgattcttttgctggagtttcttcagctttaagcgcgctttgatctcggctagttgaagctgcagggtttcttcgtcttcttcttccccatcatcttcatccacaatttgactcgcttttgatcggatattgggtgtggttcttgatcgcttcaatggcgataccaggtttcctcgagtgcgttgcatgtcttggtactttcgtcgtccagctggcgaactcaagagagccgcgcggggtgattgaggcggccacacaggttcagccactttttcaggggagagtagttagtcaccgattagtctaatcgattggagggaccgtactggcgatcaatgagaggattcagacgtaatggagaccgaatataccatggagcgtcatttgcggcacgcgccctttacccttgcgcagagtgtagaattcgggatgtaaaatgtgtggaaggtgcagtcacaaggataacagagagctgagagccgaggacagggatacaataacaaggtcaggctgaaactcgctaatgcaaagggaaagtgacggatcgcgcgcacagggctgattggatcgggaaggcgcgttcgccgcgtcgcgcccttgccattttagccccttccgttcccacagatcttctagtcttcaccctcacttccacctattatcacacaatgaggactcgatcagcgccagtgtcaaaatcaaagaagtctgaagacgagacaaatgccaaaaccctcgttgccgcagagaaaccgagcaaaacattcatccttccatcctcaaccagcgacaatgcgcgactcgtctccctaccgaatccccagtcgggagagctaacacgctacttcttctgcccggatcgcggtatatacgaatttacggttgttgcaccaccggcgcatatggcgcggagtatcctgttcacgcctcgcacgcgtgaaacctccaatccactggacgaagagaagaaagaccccgaaccctccgcgcagggttcaatcacaaagaaggcagagttcctggtggcaactccgatcgatgcactgtttttcatggttccattgttagcaccttcctcgaaatcaggccgttctcttttccagccattcgacgatataattgattcccaagacgatatgccaaagcatctgcgccaagtcctttatgatgatgaattcagagactccctcctagcacgggcggaagctatctgtgaagtggtccaggctggtgatgagaagatgttccggttcaatgagacaaggcttgtccaggagttgatcacaaaggcagaacgtatggcggatcggggtcttcctgttagtctggaagaacggtttgttcgtcaggcactagccacgcccttgatgtcggtcaaacgagaagatgttgcgactagccaggagccatcgaacgaaagccaggattcggcctcgaaatccgaggtgagggacaattcaccctcgactgtggctacaactgcgaccccgtctattgggacacctgcaggggagtcgacacctgtgcctcaaccaccgagtgaagagtcgacagcttcggatcacactactcggctcctccgaatttccactgcactagccttcatgaaagaatcatatctgcccgccaccatggcctcgagacttgatgagatcctcgagtctgcagagagccctatcgatttcaagccgctgaaagaccgtctcaaggagattacggaccttcgtgctcaagccctcgcatcacgcgacatgtccaacttcacccggaaacgagcccttgatgatgaggaagaggatatacggggcgagaagaaacgccgcaaggatgaggcggagaaaaaatccaaggctgcagaatcccaagcagttaagaagctgaaaaaggtcaatacgagcgggatgcagaaaatgagctctttcttcgctaaggccgcacctaagaagaagacttgaaggtctctgagacaaaaccaactgaactataacatagccgtatattatacaggtaattcattgccctggcttcggaggaatccaaccagcaagttctaaggttgaaagattatgtctataaatctggaggccagagcctcctgcccagacagagcaacctactgccagtgcaaatgaggtcgagttgagatcctcgcctcgctccgcaatcccaactaatctgcgcgatttcttggaaggcaattacagtggctttctgaaagtcaccgatgcccagacgatttggggtatctttcttcgatccggcgcatctgtgtacagcttcatgtatactatttactaaataatccatgaaagataaatgtgattttatattttggattttggattttggattttggtaccagcgataaccctattcgggtgggctttgcgtcaatctgctatgtaatattcaaagagggatccggtcaatagcagcacccgtaatcctataaccagaaacattagccatcatccagtcactaatgtatgccatcgatcaaggtgtggggaaggaaacaacatacaagaacgacccattggatggcttgctaataaccatagcctcctccaatttctccttgctgatatccgggaacttcttaagataatattcatccctcaacgcagcagtaacagcctccaccttaccctgaggcagcatgtgaacggtgcaaccaccccacccagcaccggtcaagcgactaccccaagtacccgcacgacgcgcaatagcacagatctcatcgacctccggtgcactgcagtcatacgccgtagcacacgattcctgcgactcgttaagcaactgaccgaggtagtgaatgcgcttctcgtctagctgggtagccttggtgaggcaagctttaaaatcaagcacacggcgcgcctccttgaagcagtgcagcgctcgttggcggagcaggaaccgctcggcttgcacagggaatgcggagaggaaggtcgactctagctcggctacggtgatgtccagcagctgcgccatctcctcgcgcgtgtacccctcttcttgtgtgaatacgttcatggtcgtttggatcactgagtcgatttggtactctagtggatcttggacacggccttctttagccattagctcgttgtggaagttgcgcaggctgtagccgagggagctgttgtccttgggtagtgtcacgccgtggtgcttggcgaggatcacggcggcgagggtgcactctgctacgcgcaggttgtagtggcgcggggcagtatcggccttgttggaggttacgaagctctgggccatcaggaaggtgatttcgtcggaggatgtggggattgggacgtgttggacgttgaatctagggaagaattgggtgtagagcaagtagccgcgcttggagaagatagaggctgcttggtccatactgtgattacgcagtgatgttagatttctgtcggcttctgtcgtccgttgataataactcacccgccagaatagacgccaacagcgcgctccgagacaacagccagatccaacaaatcctgcttggagacgttgtggttattggccttcaacacagccagtgcactagcgcacacgaaggcagcactgctggagataccaccaccggggggcacattgccgtcgaccaagatctgcatgctggcagggacgagcgagccatcgggcttctccttgcgcaggaacttgagggcgcccgacaggccggcacggaaataattcacccactcgtgcttcttggggtcgatctcgacatccttatcgtggggcacgctaaactcgcgcgtggggaatttctccggcgagacgttggcgattgtgatggtggtgccctccgcgctggcagtgaccaccttgacagccatgatcacgtcaacgctgacagcagtcggtaggacatcgtacagtgagtagtcgatgtgctcgccgatgatgttcacgcgaccaggactccgcgccacgaaatctgggcggtggttatatgtcttattgaactgggtgatgagattggtccatcttttctggtgctccggtgcaactgaagtcagcgaggcgtcgtctgttgcgtagacttccgcgatggattctgtttgcggcacgagctcctgttggggtggcatggcggggtaagggaaggtcgaaggcggggaagtgaggagagataagaatgggaagaaaaacaaaggaaccgaagatgtaaaaaaggagaagtagtaggagtagagctgaagtagtaatttgtgtgtaattcctcttcaaccagatgtctccatattccccgattccggataaagtggcacgtggggttgcagtagggccatttttgcctttttgagggattccggtggttgcgtgtagctgctttgcggggattgcccccggagtctccattcatcaataactccacgctttctgattggttggttagtttcctctcgcggcggctttctaccggattaggctatgacggcattttctattctatagacatatgttgaatgttccatctctgcttcttgttctggctctttaattgtacctaattcatccctaccgtaatccccttatatccacaacatggccttgctctacgatgtacgtaggcatgttcctggactgcggagtctcgagccgaccgcatgaggtggcggtatcccgaaagtggacctgaagatcggcattgtgccatctaactacggcccgatagaacccgagccttcaaaggataaaaagactatggattcaaaaaaaaaagaaaaggaatggttggaaccctcgactttggcgttattagcaccgcactctaaccaactgagttatggaaccagaccggaacttctgccagtaattgcctactccaataatcatcatacatattaaggactcatggagactcgttttctatttaaaactacgcggattttggggataaaggaaatatcgccgccagaaagagcatcggacgatggcattcttatagctctttagatagtatgtttgaaaatccctcggaatttccgagcacagtctgcggtatatatgttgtgtatagaacctggtatactccgtacatagatggttgggcaaccagtgtatatgttgtacctaaatgtgccaataatagtttgcatgcggggtttcgagctgatcccaagccgatggtattctgtcgtctggttcaactcgatctaattgtatatacccattagttattccaagaatatagagaatttgaatatacctctacgaaataatccaagtcaaggcgcagaataccagtagagaaaatctactccgaaacaacatgataattgttgacttgtttggataggtgatcaggaaaaagaccagcgtagccgagcaaaagacctcggaggctttggtattagcagatcatgaagtaagggatcaataacatcgcatatactatatacaaagggcgcaacaggaataagatccttacaaggtacttcgtaggctccagacgctcgggccgatctagaccctctagaccgaaaagttcgggggatctaaagtcaaagttccggtgagttttgtgtagtaggggcttgactatcgtgactttgaagtccctgtctctggtagacatccactatatgtctaattcattaatgatttgttgggaggtgtacaatagatatgtgtacaccgtacgacagactattgttgccgaggacgtacgggaaaatcaaatcaggtgaccgagccacggccgaggtcggagggcgcgaaggcgcatcaagccaatcagaggccccaaatttcttgactcagagcggtcggacattttgggttaggcgttttctcggaaaccccagagacgagtcactggtaatcttcagcggtcaattggcactcatttttctttactttaaatcactctaccctcagtcttcctggcttggccgtcattcacgatgatgcctttaagaccctcaaaaagtgctctgcgagcattccacctccagaaacagcttgctggacgtcgacctttttctacctcatttgtggcttcggccgcttcgccccaccgctcctctgtccaaaagcgtgctcagagcacagctacggcttcaaatccgtgagtttttttgtgcctcctatgatcaaaatgtaattgcagtttgattctgaactttttaatcgtcagggagtccagacccgtgcccagtccgtcattcaaccaggaaccccatcgcaatgagatttctcccttgcaacaccgccagctccccgagctcgatgactcgtatgttaccctgaggaaattttggacacatgaaaactaattagttggtataaagaatggttggaatgagtggtggcgagatcttccacgagatgatgcttcgccagggtgtgaagcacatctgtgagtacttcatgcttgatattgcacaattggccggttctaatatttgatgtgcagtcggttaccccggtggtgctattctccccgttttcgatgctatctacaactccaagcacttcgatttccttcttcccaagcacgaacagggtgctggtcacatggccgagggttatgcccgtgcctctggcaagcccggtgtcgttctcgttacttctggccctggtgctaccaacgttattactcccatgcaagatgctatgtcagatggtactccgatggttgttttctgtggtcaggtccctaccagcgctattggaaccgattccttccaagaagccgatgtgatcggtatctcccgtgcctgcaccaagtggaacgtgatggtcaagtccgttggtgagctacctcgccgcatccaggaagctttcgagatcgccacgagtggtcgtccaggtcccgtcctggttgacctacccaaggatgtcactgctggcattctccgcaaccctattcccatgcacagcactatcccttcgctccctagcgcagctaccgtggcggcccgtgaaatgagccggaagcagcttgagagcaccatcaaccgtgttgctcacctcgttaacattgccaaaaagcctgtcctctacgttggacagggtctccttgctcgccccgatggccccatgatcctcaaggagtttgccgataaggcatgcattccggtcaccaccaccctgcagggccttggtggatttgacgagttggatcccaaggctctccacatgttgggtatgcacggatccgcttacgccaacatggctatgcaggaggctgatctgatcattgctgttggtgcccgtttcgatgaccgtgtgactctcagcatccccaagtttgcgcctcaagccaagcttgctgctactgaaggccgcggtggtatcgtgcatttcgagatcatgccgaagaacatcaacaaggttgtccaggccaatgaggccgtggagggtgactgtgccgacaacctccgtcttcttttgccccatgtcaaggctgtttccgagcgacctgaatggttcgagcaaatcaacgactggaagaagcgcttccccctgacactctatgaccgtcagaccgaggatggtcctatcaagccccaggctgttatcgagaagcttagcgaactcaccgccgaccggaaggaaaagaccattatcaccactggtgtcggacagcaccagatgtggactgcccagcacttccgctggcgtcaccctcgtaccatgatcacctccggtggtctcggcactatgggcttcggtctccccgccgctcttggagccaaggtggcccgtccggactgcctcgtcatcgatatcgatggtgatgcttctttcaacatgactcttactgagctttccaccgctgctcagttcaacattggtgtcaaggtccttctgatcaacaacgaggagcagggtatggtcactcaatggtaagctgttccctccggtcttcctagtatatctggcttacttttttgttacaggcaaaacctcttctacgaggatcgttactcccacactcaccagcagaaccccgacttcgtcccacttgcaaaggctatgcgcgtcgctgccgacaagtgcttcaaaccctccgaacttgaggagaagttgaagtggctgattgatcacgatggccctgccctcctggaggtcatcactgaccgtaaagtgcccgttcttcctatggtgccttctggccgcggtcttcacgagttcttggtctacgatgaaggtacgcaaacccctggctagtgatttaggaaacagcattaactcatttattacagccaaggatttggagcgcaaggagctgatgcgccagcgtaatgtcgacttccatgtccggaaagagtaggtgactagccaatgtcacctcgacaattcatatttctatactttgatatccatggcgtttcttggctggttcaccaaaagcgattagggcaatatctgtctaaagatgaacaaaaaatttgtcaaccgggttgctcttggaggtctctttggcagagaagtttggtgcacgcgggttctatatacctgttaggcttaacctatcgctatatccttgaaactaccatggtgaattgcatgaacacgtgctccaccatggcctttgatcgatgttggccttctctcttgccatgttgctcctcttgtatataatcatttgacgtctcgggttcctcgatgggacttgggaaattgatatgtttgggttccattaaataggggcagttagtcattgaaagcatttacctcttgtttcattacgcgtcaatgaacacttccttgtatgtttatcatcctagatggcttttatatttgtcacttaaaaatgtacgtagctccagctctggtggtgttctttcataatctaaatgtggaaccaccttcctaaacgggtaataggttggaaagcagagggcaagccatataggaagcaaagtaaactgcatacattctagctattgctttgccttttggcatagtagagcatgtcaataaaacctgcagtcaaaaacgaagagccaaggctggatatgcctaacggatggtaacgaaagaagcctacccacatggcagagcatacttatccaaacaggcgattataccttcgcacctgacacatttgcaaacaatatctctttctttccgtcccattaacacgctcgctttgatcacgttctttcatataccctagggcttgcataccgcacagcaaacgaccattaagagtagcatgttatattcccctcaaccaccttaaccttcacaaatcacaccttcttttgataccaccactctagagacatccattttaaccatcttgttcctatcaagaacctgactagggaatgatactagatcatggactctaagaggtatggtttagatctctcttacttttgcaagatattacaatcgatttgagagatatctgaatatggttcgagaacctcattgctaacccatttaatctataaaaggctgtgccgtgatttcgccaaaggcaattgccgatggaaaaactgcaaatttgttcatgcaagcaatggccaaagtcaaagccacagtccaacaatcccagcaagcccagcaagccaggtccaacgtcctgagccgctgccccaaagatcttgtatcttgccaaatgcagataaggagtttcgagcatggcaaaacagcattcctctacgctcgacggtcactcgtccatcctctgggaagaaaacaactctcttccagaaagcgagggaactgattggatctgacgccagtattcgacaagaagtcatacgaacattggccagtgaggatggcctgcgcctcatcctggaccttgtccaggaaaactttgaagaaatgaatgccgcaaccagagacctgcttttcaagactcaggtgctaccatttctagagacaatcaccaaccccgaggttgcatcctctctagtattggaacaggcagtgggcacaatctacaatgtcttgtttggacttgacggatccagagcagcgcgatggctcaatttcatctgtggcgttctcgagatcgacaccaccaacgaaggcagtgccatgttactggaggcatctctccacacgttctctcgtatcgcggacctgaattctactgctcctgtccaggattgcctgcatgccgttgcccagagatttgaaactgtgttgacctcgatgaatgataagaatggaatgagcggcagactttaccagtctcggatgcaccttgatcgtcttcttcagcgcatggagactggaaactcgctctcaactggtaccacggagaacaaagtcaagaatgaaagcaacgtcgcttttgtcgccaaccgcgagacgcccggcggcagacacaacaatgactttgacgatatctgtcagatcaagatcatgcccacctttgaagaaatctgcagccttcgaggggagtatctgcccgtcaataacccacttcaatggcacattgatggtgtcgacggattgctagatcgaaactttcggttgttgcgagaagacaccgtcggtcaacttcgagatgcaatccaccacgaactaagtccccgtgcgcagagatcgcaattgcgcaggttcgtatatcccaattccattgtggtcaagctcgagttcaattggctttgggggttctacttcgaagtcgacttccctcaacctgctggagtaagaaacttcacacctaaggcccgagagacgtggtggcagaactcgaaacgtctacagcccggggcgcttgtgtgtctaatcgttcaaaaagacgtggttgtgttttgcactgtgacacatcgtgacatgtcaccgaggtacagaaaggataccccctcacaggatcacgtccccccagagaacaaggcaaatccaagaactttatggaagagcgccacgagaggctcagttatgttgatgccagttgattctcggtgcaacaacactcaagtcgttctggaccttttcgactccaaaaaagccaatatgtctctggtggagtttccaggagtcattcttccagcttttgagccggctctcagggcacttcagtcgatgaagagaaccaaaaatctacctttctcggagctgtttgtcccgtggaccttcgacgatttcaacttatttgacatggcccctcccttgtatgctttgcagcctggttttgctttcaatctccgctgcctcatgaagaatgatacgaatttctacgtccgcgttgatcaaccatctaacgtgaaatacgtacaggataattccaccctggatggtgcacaggctcatgcattgatcagctgtttgaaaagaaagctcggtttgattcaagggccacctggtaccggcaagagctacactggtgtggctcttatcaaagtcttactggcaaacaaagacgctgctgctggaggaaacctggggcccatattatgtgtcacatacaccaatcatgctcttgaccagcttcttgaatctttactggacaacaaggttacatcgcaaattgttcgtattggatcacagtccaagtcggagaggttggaaagattcaaccttcacattgttgcgagagatacaccaagaacaaaaatggagaaaaaagaacgatggagtacagctgagatactgtcatattgcgaagaagattttcgcgcgcttgacctgaaaaatgaggtctccattgcgcgtctcaagtcctatatccaacgaacaaaccccagccaacataatcagctgttttcactggtccaagaagatggttctttgagagtacaaaaagacaacccccagaccgcgatcaactcctgggtggattcagcgcctgcaggcagtgctcgtgcacggcctgtggaggaactcaaaaacattaatgtcttcgagatgtctcgagaagaacgacagcttctttacaaccgctggtgtcatgattaccgggcagaagttgaagaaagagttaggcgaatcgtttcctctcacgagattgccaaaaagggatatgatagcgtccaggatgaaatgcaccttcgctgcttggctgaggcagatgtcattggcatcactactgcaggacttgctcgcagattggatatgttccgaagacttcaatgcaagttcatgctgtgcgaagaggctggtgaggttcttgaatctcatattcttactgcgtttctaccttctgttgagcatgcagtcctcatcggcgatcagcaacagcttcgtcctcaagtccagaattacgatctttccagcgagaatcatcgaggtggagcacaatattcactcgatatttccttgtttgagagactggtgagctcaaacaaaagccccatggactgtggagctcctttcagcacattggaaacacagcgtcgaatgcatccgtctatcgctcgtctggtccgtaaaaccttgtatccaagtttgaaggatgctccatccgtttcagagtatccggagattatggggatgcggaaaagactgttctggttggatcaccggcatcaagagggaggatctgacggcgattccatgtcaacctctcactggaatagtcatgagattgatatgaccgttgcactggtcaaccatctggttcaacaaggcgaatacaaacacggagacattgcagtgttgactccgtatctgggccagctccaccgactacgaaaacggttcgatgaactctttgccattatggtagggaaccgtgaccgagttgagctcaaacaggcggggtttgcaggttatgaaaccaaggataagcctacgatcaaagcagccttgtcagaaactcttcgcatggccaccgtggataatttccaaggcgaagaagctaaggttgttgtgatatctctagtccgcagcaacgcaaagaaccaatgcggctttctgcgcacttccaatcggatcaatgtcctgctgtcgcgagcacaacacggcatgtacatcattggcaattcgcagacctcaatccatgttcctatgtgggctcaagttgtgaagattctgagacaagaacacaatatcggaaaggccttggagctccaatgtcctcgccatccagatacaccgattgtggtctcgacaccagaggattttccaaagttctcccccgaaggaggttgcaacctgcgctgtgtcaaccgcctgcgctgtggacatgcctgtatccagaaatgccattcggatgtgcttcacaacgctgtcttttgcctagagccttgccctcgatcgttgggtggctgcaatcacccgtgccccaagcgatgcggggatcgttgtccggaaaagtgcatggtcaacgtataccaaaaggacaggacacttctttgcggccatccaatgccagaccttccttgttggcaggatcaagatatctccaaggttcgctgtctggtgcctgtggacaagacgatcctagggtgcagtcataccacctcactgccgtgccatatcgatgtggaagcacaagactatcgctgcctcgctcaatgccgcagcctccttccttgtggacacttatgcaagaagatttgttaccgctgcatcaccaaaggacctgagagcgtcccagctaatcatggaaattgcgaacaacggtgtgatcgaaatcaatctacatgcgctcatacctgcagcattccttgccacgctgagaagccctgtcctccatgcaaagctccttgcgaggtgcactgcggccattccaagtgcccacgaaaatgctatgagccatgtactccctgcgcggaagaaaaatgtctttcagcgtgtcctcacagcgtctgttcaatgccgtgtgcagccccttgtgaccatgttccatgttccaagcgatgcgagaagaagctcgaatgtgggcaccagtgcccgtcagtgtgtggagaaaaatgtccctcgtcctccttttgccaaacctgcggaaacgaggacatccataatcatcaagtcgatttcatcctgggtgaaacatacagagaaatcaaccttgacgaaaacccatgtgtattccccaagtgtggacatttcctgacaatcgaaaacatggatgcgcaaatggatatggctagctactacgatgtcgacgccagcggcaagcctgtctctatctgcgtatcattggcaccgttctcgattcaagacatcaagacatgcgccacctgtcgtggcccattgcgagatatttcccgatatggtcggctggttcgccgagctatccttgatgagtcaacgaagaaattgatcatcttcctcaatcaggaatatgtccctcttgcacaagaacttccccagcttgtccgtgaattgcatgaatgtgatggccaaagaatgtatccatggccagcggtgattgagatatctggcgcacgaagccatcaaatccagagcatgggcgagatcatcgagagcacaaatccaggtcgatgggatgcaatccttgatctgcgaaagcgtgtcgatctctatcggcaccatgtgaaacccgaagagcaaccctttgaaagagttcggagaatgatcgaaaatgcccgacagcgccaaggcctcacaaccaaccctaagcatgtcgataatgtgctgcagacaaaaggcttcctacaaggcaccgccctcttgatccgcctagacattgctttgattgttgaccttttagatctcggttcccagggacgacctcacttggtcgcacctcgattcgagcttgacctacagaagatgaaggacgattgccagaccctcatccgccacgcggccagtcaccatcgacttctacagcaggcagagggtcatattttcttagcacagctctatgccctggaacgagcacattgcttgactccagagaagaggaacaatatcttgatgcatggccaggcttccattcagaaagccaaaggtctttgcgatgcacacccaggccagacacgaggactggcagatgaagttcatagcgtggagaaaatgttgcgcggaggcacattctacacaattatcaccaacgaggaacgcatgtcagtcctttcggcgatggctcaagagttcaggggaactggacattggtactattgtcgcaacggacatccgtttaccattggagactgtgggttggctcgggagataagtcgctgtcccgagtgtgatgccccggtgggaggtgagagttcggaattggcagatggagtgagactggcggtggactgggatctggacagggagagattgaatctgtagggggagatgggttgattctgttgctctttgcgctgctcattctttgtgtgcatcctttgtgattaggcaactcaatttgcgtgccgtacagcaggtagtcaggacacattgaaattttctactttgactgtttggagactataaatatataagtaaaagctttgaagcttaaaaccgtgaaggtttaaaaatgaaagctctggcgatgtaagaggtggaatgttatgagcagccgctatcggctgccgtaagaagttcacgggtgacgtctcggggagtctcaaggtgacacgcctaagcttatcctgcactcacctccttccgctttccctcccccattattcccaccttggtactttttttatgaattgattcgcatgcactctcgctagctcattgtctttggcattgcatgtgttcaccctgctctccccacagtttccacccctcacccgttccatgatggctagcccaccacccgtcaccgaggaccagaaccgcccccccccggggggatttgggggggggggggnnnnnnnnnnnnnnnnnnnnnnnnnnnnnnnnnnnnnnnnnnnnnnnnnnnnnnnnnnnnnnnnnnnnnnnnnnnnnnnnnnnnnnnnnnnnnnnnnnnnnnnnnnnnnnnnnnnnnnnnnnnnnnnnnnnnnnnnnnnnnnnnnnnnnnnnnnnnnnnnnnnnnnnnnnnnnnnnnnnnnnnnnnnnnnnnnnnnnnnnnnnnnnnnnnnnnnnnnnnnnnnnnnnnnnnnnnnnnnnnnnnnnnnnnnnnnnnnnnnnnnnnnnnnnnnnnnnnnnnnnnnnnnnnnnnnnnnnnnnnnnnnnnnnnnnnnnnnnnngagcccgcctcctcgaggaggcattgggggtggtgaggcagcagtcgagtctgatgcgcaaatgcctagagactcctggaaagctcatggatgcgctcaaatgcgggtgagctcccccatgaaactccccaggcagcgacctcggaacgtgcgcaatgggttcgtatgctaaccgcttgaaatcaacttctacagatcgactcttgtttccgaattacgaacccccagtctcggtccgaaacagtattacgaattgtatatggccgtttttgatgctctgcgacacctttccgtctacctaaaggagaaccaccccgtcaaccatcttgccgacctgtacgagctcgttcagtatgccggcaatatcgtcccccgcttgtacttgatgatcaccgtaggtactgtttacatgtccgtcgaagatgcgccggtcaaggagatcatgaaggatatgatggaaatgagccgaggcgtccagcacccgatccgtggcctgttcttacgatactacctctctggccaagcacgggatcatttgcccctgggaagtggtgatggcccagagggtaacatgcaggattcgatcaactttgttttgacgaattttgtggaaatgaacaagctctgggttcggcttcagcaccagggcccctcacgagagcgggataggcgcatacaagaacgacgtgaactggagctgcttgttggtagcaacatcgttcgactcagtcagttggttgatcttgaggggtacaagtccggtattttgcaagcgcttttagaacaagtcgtacaatgccgagatgttctcgcgcaagaatatctcctggaaggtacggctcctttttttttttggaagatactcttgcttggtccatttgctaatttgatcaacagttatcacgaaggtcttcccagatgagtttcacctgcacaccctagaccttctattgtcttccatcgccagacttaacccaaacgtggatctgaagaaaatcgtcattggtcttatggaccgcttgtcttcttatgccgcaagggaagcggactcggcagtggagccagaagtacgaaaaaaaagcgaggaagaagctgtcgccaagctattgcaaaagctcgagcttgccaaagaaaccaaagccgaggagtcgaaggaaaccagcatcagcacgagcaccgatgaaacttccaaggaaaatggtaccgagaatggcgaagcagaagcacccagcgaaagccctgagcctgctgaacctccaacggaagaaaaccaggttgagtgtggggatgatgctaagcctggtattccagcagaaatcaagctgtacgatatcttctacgaccaagtggttaatttgatccgaacgcgtgcattgccgattcaagataccatggcgctgttggtatcacttgtcaatttggcattgaatacctatccagatcggttagagtacgttgaccaggtcctggactttgcgacgcaaaaaactgccgaatacaccgatcatgccgatttgcattccgcaccaacccaacaacacatcctccaccttctcaatgctcctcttaaatcatacatttcgatcttcacagccttggccttgccacattacctgccactactggcctcacagtcgtaccccacaaggagggctgttgcgggcgaggtgattcgcagtcttttgaggaacaagatcttgatatccacaccggaaaacctcgaccgtgtgctccaggcggtaagagtattgatcaaggaaggcatgcagcagtctgctggataccccgggtcacagtctcagcggcggggaggagaaaccgatgaaacggtagaagagcaagggtggcttgcgagactcgtacacttgattcaagcatcggataatgacacccagctaaaggtaagatcacttgccagatgtgttacacctataactaacagtctgtggcagcttctccaagcaacgcgcaaggcattggccgatggtaatgaacgaatccgctataccactcccgcgatcataacggcctcggtccgattggcccgcaaattgaagtcgcgcgagcattacgacgacaattggcaatcacagtcgtcggctctataccgattcatgcaccagagcatcaacaatttgtaccagcgcgtcaatccaggttgcgctgatctctcactgcgactgtttgtcatgtgtggcgagattgccgatcaaaccggatttgaggaagttagctacgagttctttgcgcaggcattcaccatctatgaagatgctattagtgactcacgcgcccagttccaggccgtctgcattatttcgggcgccctacatgggagtcgtggattctccaaggagaactatgacacactcattaccaaagctgcgctacacggaagcaaactcctcaagaagcctgatcaatgtcgtgcggtgtatctcgcaagccacctttggtgggtagttgagaaccctcaacgcgaagaagatgagcctaagggtgtaagttttatttccaactcgaattacaatatcttagtatctttcagctgacatcaattttacagctctaccgcgacggcaaacgagtcctcgagtgcctccagcgcgccctccgtgttgccgatgcgtgcatggacaccgctgtctccgtcgagctctttgtggagatcctcaaccgctatgtctactatttcgaccagcagaacgagaccgtcactaccaagtacttgaacggtctcattgaactaattcactccaacctgcagaccaacgaagacgagcaaaatactaaccttgacggcccgaagcgccacttctatcgcacgctggagtatatccgctctcgcgaatacgaaggcattgtgacagatccaccgaagtaattgccaaatggatttccagaccattttggtcaagatgcaccccccggtcatcttctagaagcactgtatgtcattgatacgtgggattcctgctttgatcctcctggaaagacttttttgtttgctcgacttcatttccttggtcatttttttgtctttctcttgttcctggaagcctgcctctttttctcttgctgctcctcggatttctttcattcctagtatatacaagtgtatcattgtctccggataacaccatacccttttcagcatgatttgtattggccatggacaacatcttttttgcctttttgtagtacaaacacgcaccagtgtagctccgtgaagttgatcaatcataatgaatatgactgaccatacctatatacctatatattcatgcgaggagccgtaccaaatttcttccggaaaatatatatccaaaaacctacccaagatgtttttttacgttgctatgttctacgcaaaaagccaacaaacgaaagccgaagaaaccttcgatcatgcaattggtcaaggacgatgacggagtgggggattaaccctatctccacggatatcgctgcataatgtagaaaggccagagactcataccgtacatgaaacaaatccggatgccgtacttcgaaaagtaaggcattcaagcattggaaaaacaccaagcaaataaacaacccatatcaatagcagtgactccttcggttagaaagatgtagacagatgtgtgattatgacgtgaatccatgacgcttcagtaaaaagggacgagaaaaaaaagaaatgaaaaagaaatagatgagggcatttcaaagtcgttccaacaagagtgcgaaaaaggaggccaagaagaatactcaaggcggattagcatcaaatcatgatcaggatagagaagtcccgaataagccagtcggaggcgaagcatactgccgcagcacagagggcccaccaaatccgccgaagggggctgggtggctgttactggggatcgggctgccgatatccccaggcacaatgctgccccgatgaccggagaccgcgctgttgggatcgggctcgaatcggacagactggccattcgggccttccttgatagaaaacgatccgccgccattctgggcactaccttccgtatcgcagatgtccagcatttcatccaaagagatcgatggctcgcctgagttgcgcaattgctccacctgaccgagaacaaggttcacatcgtggaagcttccagtaccgttctgcgggctggtcatcgtgtttaactgcttgcatgcttggatgaccaacaggcgaattgtaacgggccgagaagtgtgggaccgatgatgaacacccgctgcgaaggcattattaggaggccagccagttccagcaggggcgggtccccatgcggaagggaatggggagcccgcaaagggcgccgcactccatgtagtgttacccattggagaaccaaccgcgaagtgattttgtggggtacccagaggatccgagaacaaggacgatccttggaagctcgctcgcgttggccccggaaatgccccaggtgcgggggcaccaggcaatgattgagacaggtttgacggatatgtagcatcagtgtcatccagaagcgcactgctacctagatgagcactcaagccatccacttcccgttgcactgaagcattgccattgttctgccgatcctgtgcggagctggatgggcgtttgatagggcttggccgtgtgatggggaatggctgggtcccagactctaacggggagcggtcaaatgaaagggagggctgcctggaatgggcttttgacagaccggcttgctgcaaggggaaggccccaggcactccatggttgccagcgaagctaaggccatgtccagaatcgggtgggaacgctcggctcggcggcatggggcgtacaccgttcattccaggcggcgcaggaattccaccagatccattgaatgatcgcaaagggttcatcatgcccgcattcgacgaatacattgattctgaagggtgattcgatcgcgcagccattcctggtatgccggggggattgaacggcagacctccgaggccagcgaatgctgaaggatttgcgcgccctagaggtgacagaggggcagaaggctgcggatggtgcaaaggaggctgttgatagccttgtctggcaccgaaagacgctcctgactgcggaggacccatggaacgtggggaaatggaagaagggtgatgagaggaatcggcgctgttaggttgagagtgaggagaggatgtagaagagccatgatgagattgttgacgaggtcttgccggagtcgagaccttgggaacaataggtgtcgccataggataatgcggagactgcaggaaaccaggaggagcctgagactggatattgtatgggatgacgcctggcagagtgtgtggtggcgaggttctgatttgttcgcgctttccactccgatctcgaatttcctgctctcgtgctgcgtctcggtccttcctcgcctgctcttcacgcattttgcgctcacgctcctcttctctggttttcttttccagggcctcacgctcttccttctctttgcgtttggcttcctctcgtctcttcttctcctctttttgttctcgttgcttacgctcagcttcagcttgacgttcccgttcttctttgagtcgtcgctgcttctcggcttctttgcgagcacgctcttcctcttgtgcctttctttcggcatcacgtttcttccgttgctcttcgcgcttcaatcgctgttcttcgagtttcttatcttgcgcagccttcagagccgcctcttcggccgctttctccgcatctcggcgggccttctcctcttcttttgcttgtctttgcaaacgcttcttatctttcttcttttgcgcttcccgggcctttttagcattgcgctgttcgttcagcgtctcctcttggagtagctcatcgattagctgtttctggcgctgttcggcaaccttctctcgatatgccgtcatgactcgttgctcaaacattcgggcggcgaaaatctggaacatccgtcgcccttcctgcatgcgttgttcctcggtcatggcatcctgttaccgttattagcaaattggctcgagcaatatgagatcgtagacccgtaccatttcgtcttcgtcgaactcttcctcctcttgactatcatagtcctcatcgtcctcttcatcatcgtaatcctcatcatccaaaggaccgtgattatgcccatggaaggactgatgagcagcagctattccgtactgtgtatcttcctctctttgcattctccgttcagccaattgctccatcatatcgatgaagtgcttgccatcgtttttcagaagatcgtccgcaactgtaagaattccatctgataagaaaataattagtatccaaagttagaggtcgatctctcataatatcaatcaagtgatcttgttgcataccctttacagttagactgttgccaaatgcaaaaaaatcggcgcgggccgctcgagcttcatcatcctcaaggtcctcgtcgctgtacagctcctcatcatcgtcttcctcgtcctcgtcgtcttcttcatcatcctcttcctcttcttcgtcgtagtcctcttccaaatcatcattgttgtcttcaggtagctcctggacccggctccgtgacggatgaaactggccatgcgttctagtatgctgccctggggaccgaagaggtggttgatagagtcgagggggaggaatgatgggagctccttcgtcaaatgcgccttggttgttattcgcatattgttccagctcctcatagtatgcatcgtagaggacctccagctcttcttcaatcgcggttcgttttcttccacaaactgtacaactgcaagagtgcttttgctgttctttcattttcttcaaaacagcgtccttttccaccttgacaagctggcggcgttcttcttcgccgagctcaaaccaaaaggtcctgatattttcgcgttcttcgagagtagactggttccagatgctactatttttaataggctttccggtgaatcgactgatgtatggcatggattgaggcggaggagggtgggcgaaagtcgcggacggggtagaaagcggagttgagctacgctcagcatgattctgagattcggatcgtgctttccgagttttcttcctcttcgatgtctcacccaaggtagcgtggtggccatcggatccgttcattgtgggagatccgcgcggatgttctggtgacacatatccgtaatgaccggtgcttgctgtatggttgcgatcatcggggtaatagtcgtggtcttcatcgtaggagcgctgttcatctgttgctagcaagtccgcatctccggaggcataagcatcaggatgttccgcggctaagcgagcagcttgtttctggcgacgtttctgttttttgcgattcacagaaggcgcagaggtcacggctgatccggtcgatgtgttgccctgaggaccccgcgcgtgggtctcgccgttggttgctggaagaggagttgctgacatatgggtcgccatggtagaggtgaaataagctgcaaggactgcctcagcagcatactaataccaccagagcaagctttgagttagaaaataaggtcagagagtttggggtggtagaatggggaggaaaagcggagaacggaagagccaaagagccctaccaacaaagctccggtgattccacgatctggggttcacttaccggaattattccccttggcgtatccacgcacaaagagtaaagcgcgttctttgttgttttctgaaaatacacttccgcagtgacaaacgtgaggggtgagataggataagaacacgggagggggggtgaaaggcacggcgggtcacgacgtgtctgcgcggattagctgctggagcgcaagtaaaccagcggaggaaaacaaacaatgagtcaaagctatgattgacaaccttgggagatattaatgctgagtgagcgccgaggcaagaggtacgagagatcaaacgatgaatggatggagtgatgggctttctagccttctggctggttgtcgtgccgccgcaacgggatagccgctgcaagcgagctgatgcctgaattgtcaggttgcaatctcgaattgtatgtttgagtaacgggatcgtgcttgaaagaagatatttcaaactttccactggtagcaaagttcagagatcaactgggtcaactcttcagccaagcgatcatgccttggttacaaggttaaacagaagtcacgtctcactgctctcatactgatcactatatggtgagtcacatgataaaatctggtgtccgccttcaatctgcccgcaatatccctccacaccatggcggtgaagatgtaaatagcaaggggaaacaagtatgagcgctcgatccaccgagctgtgtgagacacggagagcgctaattaaaaatatctgccaaggtgataaacaagagagggacaaaaaaagggtccctatagggtgctgaaaccgaaaagatacccatcttttctattaatatttatgtagtcccttcatagtctcggcgtgagccttaaatctccgcttaagaggaattgtaacttccccttcatcttatcttgctcttcagcttcgacctctttcttttcaaaaaaaaaaacttccgctcactcaatttctgcccttctcctctctctttaagccccctatcatttcgaggtgacatcgcctaggcattctcgtgtctacgtcaaacccccccaatcattagcctcagccgcagcgcgaccttttccccctccccaacaatttgtcacgtcactgtttgggtgcatcttcaggccacccattcatctgctctctgtaatccctttgggcactatctgcctcgagctggtctttccttactatccatctcgccaattctcgtaatcagctgaatccgactcggaactccgcgtcatctcgctgatccacaacaccctccgctctcccattacccttgtgtatcacgaaagggttttgcaaccttcataatgtcgcaacagcaggatgataatgtgatgcgaaggtatgtgtagcccatttttaaggtggtgtcttacatccccgctgtatcgcaaggagattatgcaagccgattggaggcggccgcctagcatttcctataccattgccagtgggatggaaggcagaatagtgttcgcatatgctgacttgacgtcttactaggaagcttgtcatcattggagatggtgcatgtggaaaaaccagtttgctcagcgtctttaccctcgggtacttcccaactgtgagtttggtcctcaggcccttataagcaaggtccgtgactaatatgttcttatatgacagcattatgttagtactctcgaattcgatacattccaccccgatcacatgtctgacctctcccccgttaggtaccaacggtattcgaaaactacgtgacggattgccgtgtcgatggccgctcagttcaattggctctgtgggatacggcaggacaagaagattatgaacgcttgcgaccattagcctactcaaaagcccatgtcctcttgattgggttctctgtggatactcctgattcgttggagaatgtgaaacacaaggttcgtctcagattaattgaggaatcggtagtcatactgattttcggtatagtggatcgacgaagcaaacgagcgatgccccggagtaccgattcttttggttggattgaagaaagaccttcgtgaagacccattggcgattgaagaaatgcgcaagaaatcactcaagttcgtgacaacaaaagagggcagtgatatcgcaacgtcgattggagcccgcaaatatcttgaatgctcgtctttgacaggcgagggtgttgatgatgtattcgaagcagctacccgtgctgcattgctcacgttcgacaaacggaaatcgtcttgctgtgtggttatctgatgatgcaatttgggatgtctttctctgccagcgctcggtttttctgttgacttggaacttgattgatacaacttggtgtaaaccatgaagatatcaatcagtactccgttgtatcatgcatcactggtgtttgggaggttcttgtgttcacccagtcgattgatctgggtacgatgtctgctttccggttattttcagccgtgccttttccttgcaggtattttcttacgtctttcctttttgatcaattgtgtatttgtggctgatgcttatgcacgtgcaactccggattcccctccttctcatcgttcaattccccgaagtacattgcgatcccgctcattgtgttctctttttttatgtagtaattccggtccctttgctttcagcgctgatttctcatacattgtgctcacggcccgctcagggtaccatataatcaatttatctcctttctccctatactccttgatatagagtccgagcatatcgcacagaaaaaccataggataactcaagcaaagtctcgtagagcttgaaacgcaaaatgcatagtatatcaagataaaaaaggaaaagcatatgttacatagcgccaaaatgatacatatatcttgggccctccagtcaaatcaacatcaaatccaaccagacaacctctcctcaagacctctacttccttacaggcttcttccagtcatagttccatccatcagaaggtggagaatcggtctgcatgcgagcatactcaatagggaacatatcagtgaagatacccttcttgttcatggagacgcggaacagctttcctccgtcacccgcaccggtgcgcagctcctcgcacgcatcctgcatgctctggtactggcgcatcatctcgagttcgtgcttgcggcgctgctgagcctggaacaattgccacgcgcggtggatggtccagtgtcggaggtaacggttgcgggagaagcggaggggacggggagtgagaggatggtggaggaagtagcggatgagagctagagggttgaaaatggattgttagttttgagttctttttcttttggttggccgtgacgtgtttggtctggttgaggggctttcgggactcgggactcgggtaagagctcggcgcagggacgtgacacatactaatgcgcttatcaactacagagccgccggaggcctttctagcggccattgcgcttgttgtcgagaatggcgctgattgcagggctgctgtgactgggccgggctgttgtggttggcggttcagggtctcgtggcatgcccgggtgattgatgggcggaccggcgccatcgacattgggatcttgaagacattcgcgagggacgcgagggctggtgataaggacctcattctgatggttgtttgttgggtggaaggagtgggaaggactcgatgtaattgagttcgacggggaataattccttgacggcagaatcttgtccgccgatttagccgcgcgcttaacattcccgctacctctttagctgcaacgcatttgtgcttcatataggcatgctcttcttaaataatgatttgatttacttattgaatggctaggaatctaatttgcacaagaaagggttctacgtccgataactggtcaattaagccggtcttgataataataataggtacagatagaaatcgatacttttgagcagagatcatgacttgatatttttgtcgaataataagatagagatattcagcagtatcgagagtcatcaaaggcatcatatgtgaaatgtcccaccaaagccatcaaatagaataccataaacgccatagaatgcagtcgacgcgcgcgccgaagaaagcagaggaagtagggactcaaaatcgagaaatgggctattcaaagctatcaagtggaccgctttgcagcatggtgtttcttagctcgatcgtagttcaaaaccttgcggcgacggtgcgtttgggcgagcttccatcgacaataaagaaccagtgcatccttcaacagaacaaacatgcacccaccaacaacgctgcgaccccagcgggtctggagtagccccaggcggccaccgctcatggttggggatgtccatgacttaggtagaagacacttcaataggccacccactgatgctgagactgctgggaagacgagtgctccgagtacgacatcagcgaaattgctggtatcggcgatgatctcattatgtcggtgcccaagccctagcgggttattgttttgcgcagcatcttgtgggccgtcatcggcatcttcgtcctgctcgacggcagccccaaggtccggttcgtctccatcgcccattcccatttgcagctcaagatcgatctccatcaggatttgtccgttcccattatcaccaaaccggttgagaccctccgcctgatcttgttgctgcgcatcatccaggacttcttctgccgcgcggggttgtacctcggcaatccatttccgttccaagccaccgaatatccgttcgtaaagcgccccgtaaaagctgttgacgtatggcagcgcggcaaacgtcatagccggcgtgggtggccacaagtcaaagtccgggtcctgcccggggttatgtgaagcgaagaaaagaaccggaatagctggaagaaggccttcggcgtatcgagtgcgcgagaatattagaacgagcgggattagcggcaatccaacattcatcccgggattccacgggccctccacagtctcctccatgatctgcctggcttcctcggttccgaaaatgaggtacattgaataaacgccatgcgcgcagcacccggcccaaacagtgccagccattgtaaacattatgccgggaagaaccaatcgacctgctacgcgctcgaataatcgaagtacatcgacgacatagcttcgcgggcgagtgaccacgatttccgtcttgcactgagggcacatcattgttacaccaccgttgcttttccgcgaccgggggttttccatgtccgctagccagtcgagcaggcatgcctcgtgggctgtcaaggcacaagggcagggcgaccgccattccagattcagtggcgagtcttccgtttcatctgtgtagcaaatccagcatttgcgcggctcgtcttcctctgagacatgggggggttttgatgatgaactaagtttgctggaaatatccgattcgtggctcgaggtcgatacgctcttattcaagaaaacggtttcggtgtcctccatcgactcatcctgaggtgagacactctcttgagagatggtagtttcatcgggattggcgggggtggtatcatcgggtggtctgattctgcctggtgcagagtatcccgggacggacgccatcgtagtggggactagctatgcaagtcagggccgatgagagaagtagagagatagttgcggtaatgatctaaatcgggctcgataagagataaagaacggagttcagcatcttctgagtagagaggtgaaacatataaaagccgaaaagcaaataaatgtcttaatttgccccagagcacaagaagagagggagccccattccacttaagtggaggttggaatctcttaagttcggctgtaagccgcggctgtcaaaggcggtcacgtgggggcaatcacgtcacagacccaagctcaaaccggaaatggcaaatgatcgtcgggcgtatagatgtagatttactttctaattcacttttgagtatatatgatatactaccgttcagtgagatacaatagttcgaccattgctcttagtcctcctatattacttccttccaggttaatgacagcgctcagctctctgtgtcctaatcgtcgtcctgtgttctgaggccgtggtggacatggtgatggtgatagtagtgtttttcctggtctagttgaccgaagagcagaactagctaggcactaaattggactttggggcatgttgcagttttaatacacacccatagatatctgtgttgtgtttgcccctgcatggcaagcccatatacgaggatattgaaaagttaacctttgatttggtcgaatatggaatactactccacacagctgtctacatagaccgatggataagaaatttgaatttgaataaagtagcaaatcatcattaaaaaagcagaaagtaataaggcttgatctggcgatctggtgatcaggggtggaaaagcaacatcatagaagagcgaggggtagctaatccacacacccaactaactacagttcagggtgaatgctaccgtcagactccctctttccgtcagctgatgcagccatttcttccagggcatcatccagattagttgggactgagacagattcaggcgaccccgcgggaacagctgcaggttcagcggactttgtcacgtccatgtcgtccttgccctcctgcttatctgccgattcggttgctatgggagacgatccagccgatttcgaggtctctgctggggtctgtatagggtagacatccgctgttgtggtcctgggcgaggtcatgtcctctaaaaccggagattcaggtgttgggtctacagattcaccggcggtattcttggcaattggaggggccattgggcgttcagcagtcaccgacggttccttcactgcaacggcagacttctcttccttcttactggttccaacaacaacctttccatcctggtcgacctgccagatattcaaagcttctgtgatcttgatctctgggatagtggggagcgtgggactggttttctcgacggctggcttgcgtcgtgctggtccacgggctcttcccttacgagcatcgctgagaggctgcttctcaaccggcacctcgggctccttttcctgaggctttggctgctgcggacccagctgcagacgtgaattcagatcagtgaggaagcccgccttcatggctgcaattttgctcccgcctggacgaccaggaattgcgggcttggccttaactgcaggagcatctttcgaggcttcagcggtggttcctgcggcctgggaactgggcttagcaggacgggtagggacctgaggcttgggtctgcctggaattgatggtggttggcgcttttcggtcggtgaggtagactgaggctgtctctgcgggcgcgggggaattccaggcctggaaggtacttccggacttttcaattcttcttttgcaggctcaattgtggtcaccagctgttgactatcaggggcatcttcccaaatatctctactggggaaacgctgtttcaaagtgtcgggtcgcgcgggagtcttatccctgccgttctcgccttccaggatgagggcggccacccgatgagagtcgactttggcgttctgcatcttgcgtttggcctcttgctcgggtgtttcgaagacttcggcagagtctcgcttaggcagatctggggtggtgacggtggcctgaagctgcagactgttcggggtatcctcccagatatcctggctagggaatctgtgcttgagtgtgtcaggccttttcttgaagcgatccgcagctgacacgggtttccctttcttagcatcctcttcagggaacaacggttcatactcctcgacgtcttcaagaggtgtatacgtatcctcgcgcgagtcaaagcgggttagttggccttgcacacttgccgaccgactgttggaacgactgttggaacgactgtgggaactaggggttcgactgcggccatcatcctcgaagcttggtcgacgatcaaatgacggcgagacggcgggatgcaagtacgccgactcggggcgcacttcatcagcagccaaaattggctcatcgtcctccacggcgttctcatatgtcggctcattctcttccagcgccggggtggcggcgaatccatccggatggtgcaaaggatgcatcggatcatccacgtggatcacgccaccatcacgatgaccatgcgaactggatctacgttgatgcagtggccttgcggtagtttgcttctgcgttgcttctgaagggaaactcatctgtcgaagtggcgactcaacagtcggttggctttcgaatcgaccgtcgggagggggagaagcaatttgctgtatgtactcgtcggacgctatatatccgacctcttcttcgggggtacccacgatggatggggaagtacctagctacagttagctttcaatcggcagcacaattgcttcaaatactcaccaagaccggaaccagtctgggccgagcttcgaacaatcttgttcagatcatcgctgctcattgcccaatcgggacgcggagtgccgacaccagggccatattttccttcttccttcacgaattcatcgggatgcttttcataccaagccttctcaaacttatcgggatgctgaacaccatgtccatgcaatccatagctaccagggggcagtgaagagtcccgagcactacgagtgcggttgtggttacggctggaccgctgcgagccttgttcgaggtacgggctgggggatggtgcctggacgtcaccggcatttggatacatgggcacgcggaacccctgctcatctcccatgtgggcagagtgtcggcgctcattggatgcagttgatccggtgcgtgaaccactcgttcgggaatgcagtgaacgacttgaacgttctagttcctcgcgagcaggcgaaacaccacggcctagtcctgccgcagcagcctggcgggaatcagtccgggtgacacctcggactcttgcttccgcacttgatatcggcaacgaaggtctcggtgcatggatcttaagatcactgccaacattgcgagtctccgcaggtgtctggtgatgggtatccgacatgtttcctgggtcgagatccgcatattcaataccctcctcgccgagggacggtatcgtgacgctgggaggacgtggaggcaaatcatttgaaacggtgcgactcatgctaggaccggtccattcattgaacggcgaaggtgcatagctatcacgcatgggcgaagccgaacgatcactgcggcgattgcccgggcgcggcggtatcttgggcatttctgacgacgatgacgctgccggcggttttggagatcgggccggtcgaggaggaatgaccggagcaggttgggacatgatgaagttctgggagctgttgacaagtcagcgactgcccaaccggataccccgcgaatacgcttggccttatgcgggctcaaaacaacaatggacacacggctccaatgaattgcagggattaaggcaactactatggatatgcagcaaattgatgcaaggttctcaagaagagagagcctagccatgcgactgataagagtatacggaatgatttgcttacccggatatggtgagaattagtttgaatccaattggaatgacagtgaaaatgtgcaatgagaacagttaagaactgcacggaagtagatattgaagcaattccgaatctgagttttaggaaagagagatgatgtatgctctttctgccacgcctgacgtgctctgaccgcaagagataatgcgcgtattgtactaatacagtatcattacatgttatataagagccaactacgacgatccgttaactcaacgccccgccgatgagatcaatatagggcactttcgcttcttttgttgaggtcctataaatggcttctatctgtggtcaatattggtcttaaaataatgcctgtttctctaaaattatacctttacccgagtgaccgtctcagctcagatcaaacattgatcacatgttctttatactgtacaagatatctaaaaatcagctgaagtatcttacaagtacttattccgtagtctagaacttgatatcggacttattctttgacctttgacttctcatgataagatgatttctctgtcgttggattggctgactcgaccgaggcggtgaagtgtaatgactttccacattgcatcatcgttggctatttatacaactcgactaaccctacattgtacacttcattctaagatcaatggacattcttaacatatatgtgcactaccctaggagctttcagtctcgactctctaggtatcgctttcctttgaccttgtcatacctttaatcactaggatacaccgatctgttcaacaatgagatccactcactaaccgaaacagcgagaatacacgccacatattgatcaccagggctaaaaagaatttgcggggcaatatgacctgtgacgaaaattccaagctccatcccactatttgcgtcacgttcctgtatattattctgtctatgattcaggctagacgacggcttgtctcgtgtagcaagctggacggattgcagcctagccgggtcgcctaagtttcaagattgtcagggtgcaaattaccagatatgggatagttacatagagtgcatatacaatgtaggctgatacccaaccctaattctgccaaatacattcaatctacatctatttccatctggtcctattggtgacacttttcagggccaagcgggtatatattcacttccgtataaacgatagatttgaatttggactcttccggattcgttctttgcaatcccatccccgccaccctatctgtgggggagcgacccggggcggggttggtgcccgaatgccgtttgaagcacgattcactatccttggagtaaatatttctccgatctttaggtagaggtgaggctgacataagtatgaaataatattaggacgaacagacgttggacagtgtgggctgcttttaaacgcctgttcgcccgctccttggccctgatctatgcttcaacgcttagattccaccttctatttcagcactgcctgtccaagacgaactaggtcgttattcttaaccgtttcctgatcgaatcccttcacagccaagtctagaactgccgccgaaagctcttcccgatcaatatttgggattgtgcgcgtgaaagcgttaaggacatggaacaccgaggccagtacagatctcccaaaagtagtggaattgaccactactccgggttgagcgatacagatctcgacccccgggtactcttcaggaagcttgataaccatgagctctgtttcgcactaagaagcagatcgtctttagcataagaacagacagactcgtgcaactataactcacgcgcatgacttgatagtcacccatgatggctggccttttgatcggatctctgggtgtaccatcggcactgaagtagatgaaacggaagggtttcgcgggaccggcctcgtacatggccttgaatcccgcgagagtgcagtcttgacacacgcgcttgacctcagcaaagtcaaagctgcttgttctgaatggtgtcacagcgaccgtccttaaaggcagcacgagttagtgggcttttttttccattcttaattgccataatatcaacgagagtaggattgcgtaccatatgcaggcgtccgccccggcgaactcagccttcacatcagcagaatactccccgtagtctcgaatgacataagcttcgacgtcgggtctgttccttcttcaacttggacgggcttccgagctagtgcgataacctgggtgatctcgttgatttgcaggcattgcttaatgatctccgagcccaccagaccggttgcaccagctacaatgagcttcatggtgagagtatctcaagttcggtaaagttgtcgggtattagttacacagggacgggaatgattaatcaacgttaggagaatgcagaggttacaatttccaggggatactacttatagatcccgtcgggattcgggcccaatcccgttcggtcagtccgtcattggactctagaacctgcccatgtgggctacctatccaactctgtattagaatagcagtctgatgcgatttcaacgactccgtttatgtccagcgctcctacctgagggagcttatatttctaggtgggctgggccacggctctcttttctgctacaaaggtccctttccagcggccccgggtgctgtatgatgccgtcgttaggaaaaacagttatgcaatttcaataggtccagcggggatctggccgaagatgccacccgaccgaaattccctcaaccagcggtacggacgggcacgtacatcttacctctgacatcctgtccgttatagtcattctgatggattgactgactgatagataggcctgtgcaaggcgttcccaatctaaatgtaaatgtgtcccgagacctggtagccaaagctgtgagaggtattattgtctaaagaaaccctgcctgtgagatacatcaagtctccgacaagctgtatggaccattttactgcgttgattgcaatcgcaccattcttcgacgatttcgttgatcgcaggggacgtatagagggcggtttcgaccccgagtggtcgtatggatttggctgtaaaccaggctgctcaattagatggcatagcttatgtggcaacccttgttcgtggagaaacgagttgcatatcaaagcttatgccagtaagtaagtgggcaccgtgtccggagtctagattcacgatccccagctgcgaaaatggatccaagcccaatgccgaatgccgatctactgcatgaaatcgagggacagctggctccgggcagctggatagccaataatatatgggatttaatcaaagttgggttcgtaattgcgggccgtaccccgactcatcgggaatggcgccgatcccgacgaggctgtctcatattggagacgctcgggcggtttccaagaccaacagtcgcaatgttgggggcattgctcagcccgttctcaacaagataccgaaaccgaaaggatattgtcaagtggaaattgtggtgaagagtagggcgggtgagcagggtactgggaagtgagagctggatggactgttacaggcagccctcgctaacacaaaccgccatttgatactattagtaatcataccgcgaaaacacccggttgctatgccaaaaatcccaatcgtagtaggtatagctcttttacgttgaagggacaggggagattacaggacagcgtattaggagctaagccggaaatggcaacatgtacgtatagttacccaagtatcgcccgaatgaggagctactatgtacctaatgggtctgggcgcttttacgttagatacccaagtgtcagagttgatacctacagaaataggccatcatccacgcgcttctaaaccccgaagaatccgaagagcttccgtttcactagatctataacatacagctgaagtcatactgagtctcgtctgatattgtggcggaattgagcttggtcaaagaatacacctttgaagatagatatcggaacacctattctggcggacgcagtccacaaaaagaaaggaaaccacagatatatctgctataggaacgctcatcgactttgaaaacaaacatgtccagcgggatcatcctgaaccaaaccgaggcatacaagtacagcacaataaaaacataaaaactatttcatagcacatcccaatgcatgctgcccaaatggcattttatctctgcaccatctgcaccgagcatttcatcgtgtcgcacgaacctccattccccaggaccaatcccaaaatggatacagctggtatataacaagacaggaacggctcggtgtgaacatcataccatcagacaatcatctgtgcaactccctggccacctagggtcttgctaccaacaaactcttgcttcgtcaggcctgcgagtgcatagaaaacagacgcgatgagaaggaagacggcaccagcaatcaagctagaagccctttcggcaagactgataagttggacaccaccaaggacggcgtaaatgagggcgcgcatccagttagttgtgaagcggcggataaaggaatcgaaggtcgaggatgtgggacaaattcggaggaggaagggcacttctatgaagagaatgacgaatgccgaggcactgagacacgttaggcttcgcaatgaatcgcgagaaatgaatgcgactcacatgctgatgacactgatgataatcagaaccacgttgaatgaaaagatgttcgcaatccctagcgcaaggcaaaggataatgcatagcacacccgtcctagatcttgcgtcagaccgattcatttatatgcgcaagtgattttcgggagtgattgaagggtccaggccacctcacgaggtagcaaatggcatttgatcatttgatcaaaatgcgaaatgctctctcatgacattattcaggcttgtaaggacacggagtgttaagaggcaacgcggtagactaaccattgtccatagatgcctaagaagaccagcacggttagcaggttgagatatggtattgcagaatgtgggaacttactgaaatttcgcgatttgaactcctcagctagcgtcatggtgggctagcgaaaagaatctggggaacaagagctgaagatcacagatgggggtattcgcggatgatcagaggtgtcagagggtccggcaaagtgtacacgcggctgatccagggcggtcaaaacaaacaaaacgggcaggaacgatcgataattttcacaaggtgaaagaaagatctggggattatgacattcacttatgcagtgttgtaaatgtttctaaagcttttgataggatcatcccgaggtcgttttctacgccaagtcaaattccaccccctactaatcaccaggcagacgccaatggtcaagaccccatatagtcggtctctagggctgatatttccacttattccaacgcgtaacacattcacggtctatttttggaattctcaaagaagctggttgaataatcaatgaaatcactactcactaacatcttgaattggttgtttggttgtaacattttgcgaatctgcttctttgtatatattgcaagagaagagcactttacaaaatccgaacaacgtaagatctactccagagctggaaatatagtttgagggatatataatattgtagtcgtgtccttttattttgaaaaataacacaacatattattagaacacagtcacgaacgaatagcatttcgagtgcgatgccttaagctatcagtatgctaggtctgataggatctttatctctcagctttctgcattagctcagagtgtgaaatttgggtgaagtatcttcttcgtcaaagtcaagaccaataaattctagctatactgcgataaaatccacgacatggacggtacccggaacccagtttctactctctgcgtgtatttatgtatatagaaattgagagagatgtctagttatatcaagggagtagtcaaaggagtacgtaatgtaaaccaaacatttcgtgtccaggtgagcgatagcacgttcactctctaccatccaatcatcagttcttgtatttacctcaaagcatgtatctaaagaacggagagcgatcgcccagcgagtcgggattctcaggatactccgaaggatccatggcatcccgcttccggttaacacgctggtatgccatacgtagaatgacagctgctgtcatgcccacgacaacgaatgcaagttcaagagagtgaccaaggatgtaattcggcgcatcttgagcacggtagaagtttgaggacatagctgttgagtgaagagtattagtttgtttgtcaaactcccaattgatgcgcgatccttacctcctgccaggttgcctactccgatgtaaatagccatgccggcagcacgcttgtagtcgcctgccatattcacactgagccatgtgacgtttccggggaatgctggataaattccttttgttgtgttagctggaggataagtgtgcggaggtttgtaaattcttaccgacaaccgccaggaaaataccaaagtacataacacctgggactccccgaccagtagacgcgagacagatgataaagccgataccaatcatgcccataaagaagagaatgaatggggatcgctgcttgcgcctgtctgatacccaggctgcaataacagcgataaccgctgcagtgatataaattggtacctaacataatgatgtcaatctccgcttcattatgaagtagctcagggaccttactgtaaggagctgggcagttgaagccttatagcctaggtccttgatgattgaaggaaggaaaagggaaatgccgtatagcggacaagtgataccccagtacactttccacgaatcagtgaataatacattgaatagccgaggacgaacagaacttaccgaatagacccaaccaaatttgccagtcggtgaaagcatcgatgacatagcgcatttcgaacttatcattcgtttgatcaatttcgcgggaatctgccgagttttgaattcgcaaactgtggatcacaaatcgacgctcttcttcagtcaaaaaagtggcagtttccggggagtcgtgaatcgcaaatggggctatgagtgccacaataactgtaagaagaccttcaagaatgaaaatccatctccagccagcgtatccgccgacaccatccattttctaggaatttcgagacacattagtgaaaagaatttcattgctgtcagcaaggagaatacatacagcgatagcgtatgcaagaagcccagagaatgcacccgcaacactggcggcactaaagaagagagcttgtctaaactgtgctcgatggcgtggataccagagtgtaatgtagtatgctacaccgggatacaatccggcttctatctcgtttcattgcaatcattagtcttgactagaacaaggtggaggttggaaggagggtagacatcaacatacctgcaatgcccaaaaataatcgagctgcgagtagtccaccgtaatctttgacgactcccatcaaggtctgtgtaacatctcattaaatgctgtttgcgatcacccagaaattatgtgcgcacttaccataacaattccccaagcgaccatgatcaaggggagccatctcgatggtcttaacttctttagaagtaggttgctaggaagttcgaaaacgcagtaggtgaagaagaagacggtcactacccacaatcatatgtcaattggccattcttccttgaaatcaaatagccaaaggggttcatcatacaagtccaattgtattgcggtcccgtcatacggagatcgtcaacaagcccctctatctttgcatttccgatattcccacggtccaagaaggccagcagatatagcatgctcagcatgggaatgagacggatgtccatcttccggaggatagccttttcatcaaccccctcaaaggtcggtgagccgaggctggatgactccgcatctgtgacaagtccatcttgcttgagatcggcgctgaatagggagtcttgggtgggtgtatcctcgaagtgttgtggaggggtcttctccggagtgttctttgaatcagccatggtgaacaaagagagatgagagaagagggaaatcaaccagcgcgggacatcgttttccgagtatttatacctatcctgaataagcttagcctaacccggggtaagtccgaaaactggggatatcccttggcatgaggggtaccacatcgggataacacattggggtacttccttggcggttgaccggcctcgacgattcatttgaccccgaaaggaatgttgagcggcgagtctattgattctgggaacttttactagaggtttaatatctcacatagtgggttatatcaaaaaggactacggagtacctatgtggggagtacccgatatgcggggggacacggtccacccatcgtgacttgcggcacaacttgcggcacttaaatactgtaatgaccatactgtagcacagtctgcttcctatgtcgactgacagtataaacagccttatctggggctttgggttgtatccataatccaatgttaaggcagaggccctctcccagatccaccacgatttccaaggttcaaagtcagatcatttttatcaatccatggatatacatcaactggcttaaattgagtgccaacatgctaccagcgacgcaatactacttatgcgaagcccgtcctacccaaaggagggagactaccgagacgttatggatatctcaattgattcccataaagcactgtgttctaattgagatacgctaacatgtgccctagaaaacaggagcgatatcgacgcaacaactccagcaatctggttgagcagcaggtgtagtgcaacccaaagtaatattaccaaattccctatgtgtgtaccattccagaagagggctggtaaaaacgactggaccacatacactcgcgtttggagggttctgcggatggttggtgagtgtggcaattagtcgcgatgaaggggaacaattgtggaactggacacatacataccacgactgtagacgagcataggagagcagccggccagcagccctgggtacagagcttgtaattcgcgcccgaagaaataggaatgaatgcgggaatcacgaagctttcgagagtattgtttgtgggtagggcttgggtttttagaaagagcaaggctaggaccgatgagatggtgagttgcattgtgttttgggaaggtgagggtctcttcgtacaagccaatctcaatacaagcgtggggttcaaagattgggaacggaatctaaggagcagcttgcggttcttatttatagccaagtctagccgttgtgctgccgttgtgctaccggattatgcttgttcaacctggactcatgaagaaccaattgaggcattggatcgctcgagaaatcctaaatgatgttcttactagccaatgttccaatctcatcctgccaatacaattaattatagtaaacaatatcctaatactcatcagatagaggctcgaccttacagtatcgagggcacttagccatatttgcccctagagttatatcatcatagcatagcaccacaacctcttcctcgaccagattggccacagttactatcactcaagaccatatcattcaaggtcacctcccatttacaacaccgccaatttccaaagcacaatggcaccaggcccgtcgaccaaacccgacacaagtacacaatgggacgacgcatcgccaatatgtggatagccgccggcttccccgtaatcctatgcgagaaagcgggcaactacagcagcgcagtgcgctacattgaggaacacaaggcgaacaagccgctgaactaggcacgcaccccgctaagttggaaacaacatcctccctaccagaagccgtcaaagacgcatggatggtcgccgaagctatcccggagaacctggacatgaaaatcgcgattatgacagagctggataaaaacgccccaccggactgcataatcgccagcaactcgtcatcgctgcggagccgtcagatatcatcaataccaagaataattaccgcatctgcaatggtcactattacatgccgccggaccagctgtgctacgaggtcatgtcgtgtggctacacggatcccgagatctttccgtttttgatggagaagctgcccaggctgggctcaagcctgtgcatgctaaggttgagtctactggactggtgtttaatcgtatttgagcgtcgcttaagcgggaaatttgccttgtcctggctgacggcgccagtgatgctcataccgttgatgacatgttcaagagttggttcaacgctaccaagggtccttgcgaaatgatggataccgtgtacaatattgaggctgtctatagtcaacagcgtgatctggatagcactgccacggattggctgaagaagaattatgttggtaagggaaatttgggtgccaaagctggaacgggtttacttggataaatagagatcattatcgactaattttcattttgcaagataaaagataaaagtgttttagaatagaccattgaaactgcagttctgagagttatgacgagacaccaactggaactaatgatttattgggtataagatataactgcactctcgattccgggagtatataggaacgacccacgtcgcctcagacagtccattacagcatgacaatgaactgcagatcttcgacgacagactatgaaacacgattcggaccaaataggcgacggtgacaagggagaagatgaccctcggagccaagtcgccagagtgatgtacaagaggtaaagataaaacgaaacgaccaaaataaagtaaaatagggcatgagggtaggtatcgggggtccaaggaaaaccggccagggaatcaacggtcatcagaagtattaatatgcaggagacataatgataaaaattaggcaaggaacgtagtaaagtgagggggcaatcagaatagcacgacggcaacagataagtgtgctctgaaacctcagaggaaagggtatagagtgaagggcattaggagcaggccccagggtgtgacttgcaatcattagggtgtagcacaggcatagggccatcagcgcagagggaggggttgagcagtgaagaaacagccaaactaggttaaagacaatcgcgcgggcgaaaccttgaccaaagaaacaataattaaggggattttctgcgatgatggactttccactctgctttagcgacacgcataaacaattcagtgtctttgatgggaacccagctggtgaggactttcatgatattctcaaagtcggactcgagaatgatgtcacgcatgccatcaataagggcagcagatgaagcatgcaagacgtcaaggccttggccaaatgtccttacgttatcattagtggggactttgttcttcgatccggaggatacggagcggccagtgttgtcttcggcatcaccaaggagcatgaagacatcccacacccgaagttgagctgggaaggggatcgagtaattgaaaagtgtgaggtaccagcgagtgccgtaggctgtgggtgggattccgacctcgttctgaaaaattaagcgttagtagacactcctcgtgtttcgagcgagattgacttaccagtttcgtggccacttcacctccggcgagccactctcgttcaaagtcggccaaggcctccattagtccagcaaagccggatttgtacagctcttccagacctcgcagctgccacaatctgacgagcataataaaagaatgctcctcatcgtaatatgctagtaacgtagccgcgagagttgccattccctgtacgtagccagtgtcagggaaatatagtgacatggcgtgaaggacacggaacaatagtctttggccaccccgatagcgcctccgaaacattatatggctggagatagttcgcggtacatcgatatcaatctggacatcgtccggtgatgagatgaactggagttcattgaaggcttcgatgagctcgtccgcaggtgcgctgcctttgtggcgccgggcactggcttcaaggaatgagtaccaggccgttgaccgccaccgatctggaatgcctttccaagttcgctcgattaactttgagctctgagtatcgaactcaaaggtcataccgccgccgtccttggtcttcttagtcggcttagccatcttggtccatttgtcctcacgtcgccactccttccttcgcatcgcgcgagtaagtggtgcaccttccttctcaccagatggagtgggtagagtgagcatgtcagccgcctcatctttggcttttcggtctcggttgtgaggcaaatgattggtagcggcacgcatacgagatgtcgagcggcgcaatggcggaccatagttgctctgtgatgaagatggacgcgcactcatagaagtttgggatattttgcggactagagacgcaccattgaaagaacggttactggctggagcggttggtggacgaattgaacgtttccggcgaggtgtctcagaagctaacagaaggctagttgtaactcgctggagcgggtttatatcggaacccttggagttctttgcagggcgaatgaagccataacgatcgacttcttctgcaccgacattttgccaatattcagcaccacctgctagctcctgtgtttccctcttaattcgcatacgctccacttcgccagacgtccttggtttgagttcattcccagcctcatccgtctgagcagagtgtgtttcagaggtttcagtatccgggaccgcaccctcttcccacaagactccgttctctgaggccattgctctcgcaacctcggagtcggtaacattttcttcgcccttctcatacatcagcctaactcgccgtgacaacatatcttcgtcagccgagattgctctgctgggaagactagtctgtctcgggcgaagagtgccttgaggtttgacgtgccgtggaactgctttcggtgctccgttctctccttctggcttgctcatggtaatggcagggggtggcgcactttcagatgtctgtcgatccaactgtggatcgcaatccacatccgatatttcctgggctggtcggcctaattcttgacagggtttctgaagaggctcctcttcttctagatttttgtggggcgagtctggttgttcgggctgctcttccagcttctcctggggtgtttttgggcgcggacgtttcgcatcactcttgatcagacttccacgattggaaaactttagcgacttatccagaccacccaaagaggccgtcggtatttctaagggaataccagcgaaagggtgctcgatttgaggcactggcggagcctcttccaagctaagtctcctctccatctcgagtgaccgtttccttaaaccaccccactttctttctgaccatcgagagcctggcctcgagcctggcctcgagcccggccgtgagctaggacggaagtttggttcattcaccagaatgctaggcacgctgcgcaaggagggcacgccctccgaccgaatcgttcgagtttcgtcaccaacggacacggatggtgcgagccgggagaacatgagcacggatgcacgatcattactcggaccggctgacgcggcgctcgtgcttaaagatcggccattggaggctattggcgcatcggctgtgggcaacgagcccgaccggattgcaagaggggcgtcaacggtattttcaaagggcacggcgtgaatcgtcggattggactccgatcgatcgtgcgataacgatacagaaacctcattcaccattatcccggcatgacttgcgaatctgcgcgtgggctagaatcgcgtgaaagaaaggagtgtagggacgaggcgaaaggggtggaggccagattaagcgaaaatggggatcaaagtagaaaggagcgacaaggggaaaatcacaaaggaagttcagtagaacagaatctccagaattaaaattgagagatacctggaggcgtggagttattttgggtcggtcttggcgctctccaggtcagttctggccttcaacggggcatcttcggagtttccgtcatctcctggctacatgtaacacgtatatctatgtaaatagtatacgtatacgtgttcaaaatatctatgtagcctgactatctccctaccatcctatgagggattctcaacgtccctcttctccctcatttctccctcaaaatagatatcaaggggtttgtcccacctctatgggccgtgtgtggatcgtgagagaacaaggagtgtaagtggagtacgctagttcgactccgtaagttgcttacattagaatgcccaacggtgggatgtgacatgaagaggtaagctgtttaattgtatccgcgtatacccaactatggagtacatggaacaacacagagtatgttgtagatgctgttgaaaccctcaattccccaatacgccccagatgtacaaaacacgtggaactcctgtagccgaggcttggacaaccggccgttagctgtcaatgctcaatgtagtcaaaaggggaaaatacccccagctagaaccaacgtaaaaaaaagtatcatgagggcgtgaaacggtcaatgcagtgacccagtgttaaatgcagctcaactcatagctgctgacccgatggcgagtcgcgatttggtcgagtccgatccacaggctctttaggcaagagttcgatctgacggaccaggaagctcttctcatccataaattgatcgtcgtcagttcggtcctccaagaacttaggcaaaaacctcaacagtcgatcacggttattgatcagaattcgttgcactgccaccgatttggtcggattggcaacaaacacctagtcccttatcagagcaagccctcgtctgttttcggagccatttgagggcaaccttaccttgaacacatgaaacccttcgtattgtaccatcttgcgatcgtcccgtagcagtttcatgcagagcttgagattatctccactctccacgtatgccatcatcacgttgtagttcgcacggtccaataggatctcccccagaagtttgatgctttgacgcttggtcacatacgagtccgagtggaccaggatgttattaaaccgcccgaaaaatagttcaaaattggctgcgaggtacgaggtcacgaggctcttatggtgggtcaaaatctcctgtagaagatatgccagtcagtcacttattatcaaccttggaataggataggtatcgttctggaaattaccctgaatgtcgtgaacgcatctgcgctgacttcgaaattgctcttgtcgatccaatcaaaaaatctccagaacacaccatctcctctctgcggctggttgggcttcacgtcggatagtcgtatggccggctctccttcattggattgatcatacaaaacaatcgcagtgatgacatcgaatttcaatgcctctcggagaatgacaccacatggcattgcactttgactctgcatgtagccccggcataactcgacgatgatttctggtcgatggtggacaaggtatgaaatgacgggaggatctttttcggcggcatatgaattaggtcggaaccgaagtatatgggagaacacggtctgggtgtcttttctggcttcgaagggaagtaaatggatgctttgggctagatcaaagagtagatcttcctgaagggttgcttgtacgagtgcatggacttgatccacagacgcggcgacctctaaaacagaagattgttgggttaattttacattgctcgttaggtgctacttccaggatacccacctggtgttccttggactatcaccttcatttgactgagttgcttagccagctcctcttcggcctagttcattcattagtcgattgttctccccagctggatgtctccaaacgaaccttgggagcattctgggagtcatggatcctcagtaatagctccttggttgtccggacgatatcagcaggttgccgagaccggccgcgattgaaaaagaaagccatggtgagatgggaagaatatgcggcaaatttagaaagaaactggagatgaatgcgacatgggataagttatgattgcaacggaagaatcaagatcgagtccaaggggaagcaaatgtgatgtattcgattgcaagttgcccaggtgcgaataaacaaaccggcggggcaacggggaacttaccgcctaggcacacgccgataacgtttttttttttttttacgataaggttgacacagaaatatgatcatgatacatagcttgatagccaaatccttgagagcttgtacataaacatgtcgtgaccctcacaacacttcatactccggtttcattctttccaccatggaacctgaacttacaaaaaatgtcagaaactctgaacatgacgagccgtgagtctttctttcacttcgacattaataccattttgccatttataagggtattcaagaacttacaagccctaattcaaatacgcctgttctctctatcgagatagcacctagtatcactgtctcccttaattgccccttgggtatcctcgttacagttcaccgagaggaagatggcatcaataagccctgcatttcccgctgggacgtgcactgtgacgcatggggtcctttgggctttatgctcttcagacatacaccacaaggtctgaaaaatatcgaaggaaatcaccgttccgagactttggagtatacagaatgggatgggcattttgataggcttctccctggccaatgtctccgaaggaacttagtgacctcctcccagtttgcaatcagctgatcccatgtgagaaataagagctgctctaaccaggcgctgaatatgctcttggtcgagtttgttgtcgttgacaacacataagattcctagcataggcttactgcttgctatcttatttcccgatcaagagatctattctgtagtatactccgtagttataatcttaaaaccactagttactccgtacaacttaactaacaagtgaggctaactgaccgattatcatatcacgtgttttagtggatcaccggtcatccatggatgggtcccataggtcagatcaaatgtcgtctccgctttttttttctgtatcaaaatgatctctgcccctccccctccaaggttgaaacaatttgttattgtcttataattcatgtcagcctctaatatcgtgaacccacccgtgggtgagagtttccctgactcccagtcagtatcggattcgtccgattccagcaacgaggagggctgggaagatgtcgaacccgatgaggagtcgcagcctgtggttggccttttcactagccaggtcttccccgatgcgcgctcaatgctgaaggagtgcaaggaaaagtacaatttcgatctgctgaagattcagaaggaccttggtatttccggcttctactcttgcgggattcaacaattgaggctaacttctttttcccgcttttagatttggatttcctcgacaacatcaagttggtcaactacgtccgtactgaagtcaagaacggaaacaaaaaccctgatgtctcttccaagtccaaattcgaggatgaggtctatctcaagcccgttttggaggatgacgctctcttgtatagcttggacgaccttaccgaagagcaggtcgaacatgctgtccccgccaccgagacaaaccgacaggttctcgaactccaggagaacttggagcgattgcagacccaattctccgagtaccgtcttgctgtgcagaagtcgatggatgaccaattgtcgaaagaggatgataagcttgcagaatccaaccctctgccctcagctaaggctgtcgacagactgcaggatgctgaagatggatatttcgtatcttacgcttacaacggtagggtttctcgttgaaccttcgatgcatataatactaacatagtccaaaggcattcatgaatctatgctcaaggacaccatccgtaccgactcttaccgcgatttcgtctacgaaaacaagcacgttttcaaggacaaggttgttcttgatgttggctgtggcactggtattttgtccatgttctgtgccaaggctggcgcaaagaaggtcattgctgtggacaactcgaacatcattgaccgagctaaggaaatcgttcatgacaatggccttgaagatgtgatcacgtagggctcataatcatcccgcaatgaagagacagtactaactcatattaggtgtatccgtggaaagatcgaagaagttactttgcccgtcgaaaaggttgacatcatcatctctgaatggatgggctatggtcttctttttgaagccatgtttgattccgtcatctacgccagagatcgttatctcgcccccgatggtcttatggctccttcgcatgctaccctgcgccttgctccctatgccgacccggatttcatcgcgtcgcacatctccttctggaacaatgtctatggtttcaagatggacagcatgcttcacaaaatctatgatgaggctgtggtccgcagcaaccagcccacgactattgtcggagagtctcagattttcttgactcttccgctgcacaccatcactgtcgaggagctgtcgttcctgaaggaattcaaggtcacattgaaccaggatattgatgccttggatggatgggctatctggttcgacatcttcttcatgccctccagagagtccgttctacctgagaatgccatcccctcagatatgcaaaagaagggaattgtctcgttcaccactggtcctgatggaaccgagacccattggcagcagactgtccttctcattgaccatgccaaggatcatggtaaacaaggttcccaggccttgaagaagggccagctcatcaccggcaaaattggttacgagaagacggagaagggctctcgaggagtggacatcagtgttcagtgggagtccgatgcaaatgagaagggggtccaactatggagccttgtataggatcgactgatcttttgatacgttttctgatgaactaaaagagatatgaccacctacatagaaaaggacggccctattatctaggtgtcgtttatttgacctagtgaatacaaaatgattcagatttaggaacaagcaatgtaatgggtatctttgtcgtaattcaggtcatgatctcgtataaaaaatagaacatctaggattgattcttcgcttcggggatttcccgcctagcagtctcaggacgtttatcgtgacgatgactatgactgcgatgagaggagtggtgatgagagcgacgatgagagcgatggtgtgagcgatctcgacttgaatcttgacggcgacgatgatgtctgtcagaacttcttctgttcttctcacgttctctgtctggcgcatccaatttgaacccatcgaggctgttcactgacggggatcgccttcgccgatggcttgactgccgtgcctcttcggatttcaaaatttcgatttctcttcgcttttcgtcattccatcgcttccgttcctgctctgttgttttcaactgacgcacaccccgctttatggctgcgagtgggtcattcgcactcatacgagcctgtgtcctctctttgcgccttggatcctcgttaccccacacatctttctcgggcattgaccctggcgctgttacatcttgttccgtagaggaataccacggtttctgaccaatagtctccttgaagcctgcggcgttggaaaacctcattgtgtattggtcttcatagctgcgtttcttgcgtgccgcttcagcctccgcttcgatatttttttcagttttcgcacttgtggctgggaaaagattgatatggccggctttgtctagaatcggtgcttgtgctgcgtcagccttgcgagaggcgagcatcaactcttcctgcttagcaactgcttgtgccgcatcctcccgagcgtagcgtatatctcgatccgtgtcatcttccccagcaactcgccttctcttacgaaatcctccagcatcgctggtggactttctgtctgaccgagccccgggttcagatgacagatgggagggcgccggtggaggtgtaggcggccgttcgccgcgaagaattttgatcctgcgttcggcatcgacctcctgcatgatgcgttcatcttcttcctcgcgggcttttgcttgcgcctcgtcgcgcctgacgcgcgcgacattatcgacattgtaaacgttccatgactttttgccgaggagatggctatgagataattagccgctttcgcaaatatcataaaatcgaaagaaaatatccacttacagaggcatcttgcaaattggctgactgttgtatggacgcgctcgatagcaaagagctggtcttatcgataatgacgtccccacgggccgacgctgttcccggtggccaaagtggccccgtctacagctctacggttccaaccctcttctcttcccttcatgattaatttgctttggatatcagcatatatccagtaaattcttggacatcacattctgagaattaatcctaggtcatccgcgctgcagagccgactgacttatagttgcctgctcctttgtcgacactgtcgctaaagcaatagtttcaacggttctccggtcaacctctctgattagcgacaatcaaacggtttatcatgttcaatcgcggcaatatcccaaatccgttcagttccagcggacaatcgtccccgcagggtcactcgcaccccaaccaagcacccccacggtatgatatcgaccgctccccctcaggctatgcgactcctatccgcgataacgatgtgccgatggctaatatatataattatttaagcagttacggaggccaacctccaccaggaggaagacccgcgccgcagatgcctcctaggatgcagtccggacaaagaggtgggggccagacttggactcttcatcccagcaagagtccgaacgaaaactacacatttggaaacctgtgagtataatctagctgctttgtcttctcggagactgatacacaatagcgttgctgtttcgccgcaggacatcccaccctcacgagatggcaccgacgtcctcctccttatcaatgacctcttcgtcttctctgctcgccctctcgatggtttccctcccggttttatgagcatgtcggatcctcagcgaacatgggccaacattggattgagggatgcgatcaaggtacaattgtacgatccgtttagccaaggcggacaggcctacctgggctccgcggatattgaagtcagcttcgcatctaccaagaagagagttgaagcaccttatgaccaggatgaattggcacaggcggtgatcagggttagtcaacttcgtctcagccacgaatgtatgctaatagaacctagaactttgagaaccaattattctcacctggccagagaattctgatggataataagagtatcccactcttactgcaggtcaagaccgttcagcgggttgatttgacatcagagaaggccgatctcagttctggacaagtcgaaaccgatccttcagccagaggtattctcacacggcacacccaactcaactttttcaaggatacccagactggtattaacgtgaagccatctaatcgccgcccggcggctaactctatcatccaaccgggcttcaagttccaggatatgggtatcggtggtttagactccgagttcagtacgatcttccgtcgtgcttttgcgtctcgcattttcccccctggtctggttgagaaacttggtattcagcacgttaagggcctgttactttatggacctccaggaacgggtaaaaccctcatcgctcggcaaatcggaaagatgcttaatgcgagagagcccaagattatcaacggtccagaagttctcaacaagtacgtgggtcagtcggaagaaaacatccgaaaattgttcgcggatgccgagaaggagtataaagaaaagggcgacgagagtggtctccatatcatcatcttcgatgagctggatgcagtttgcaagcagcgtggtagcggcgctggcggtggcaccggtgtcggcgacagcgtggtcaaccagctgctttcaaaactcgatggtgtcgaccaactgaacaacatcttgttgattggtatgaccaatcgaatggacatgattgacgaagctttgctgcgtcccggccgtttggaggtgcacatggaaatctcgctcccagatgagcatggccgaagccagattctcaacattcacaccgagaagatgcgaaagaataacgtcatggataaggatgttgacttggccgagcttgctcacttgaccaagaacttttctggtgctgagatcgcaggtttggtcaaatccgcctcgtcctttgctttctcccgccacgtcaaagtcggcactatggctagtatcaacgaggacgtggtagacatgaaggtcaaccgatccgacttcctccactctcttgatgaagtcaagcctgcatttggtgtgtccgaggaagagctgtccagccgcattccatacggcattatccattattctgcgactatcagcgaaatcctgcgggaaggcgagttattcgtcaaacaggttggagtggctgagtcaactccacttttctctgtactgcttcacggtcctcctagcagcggcaaaactgctctagcagcacagattgctattgactccggcttccccttcatcaagttgatcagccccgaagacatggttggtttcagtgagccagcaaagatctcacatatcagccgaatcttcgacagcgcctacaagagtaccacaagtattgttgtcatcgacaacatcgaacgaatcatcgactgggtgccgattggtcctcgcttcagtaacagtgtgctgcaagccatcatggttttcctgaggaagcagccaactcacggacgtcgtctgttggttttggctacgacaactgagcgtgcgttgatgaagcagctggacatctacaactccttcaactcggatattatggttcccaatgttagttcctttggtgaactacggtttgtcatggagaaatcgggtgcatttgatgctcgggagattgcgcaagccctcgagtcagttggtggacttgcggatgacgggcgcttgagtgtcggcatcaagaaggtcctcttgggcattgaaacggccaaacaggattcggacaaggtcggccgctttgttcgtgttatcaaccgcgctattgaggaggaacagagcttccagtaaacactgtttataacgggctttctattactgagtattagaattaaaatagttctgaagtatatatctgtttacaatcctagtttttcttttgttggtatcttcaaagttcatctctaggcaagccaccaggctagaatccgagaacttatcaaacgccaaatgaccccattcagactgacataacgttatctcagaactgtttgataaattctttctttcattttgacgttatgtttatccaatggccgagccttgctagtttgtcatgttgactacttgtaaacaacccacgcaaagaaggttctatttatataaatcaacacgtcaagtgttcgaacttcctatgaatttcagccttgatttggctcgtatcggactgtaagtgacaaccgttttggtgtgtcaggccaagatatatcggccgtcaatgtcaatctcgcagttacacaataacataccatacaatgatcagtggtgccctatgctctagttacagtcctagagggaatcaggcacacttcaacgcctgatattacaggtttacaggcagcaattcctagaccataccgaaaaacacgtaaaaccaataccatttagaggcactgctcgactatacttcaagatacgcaaattcctagccagcatttacacaaagacctaagcaaaagagcaaaagcgcgccaaaccaaacaaagaagcaaaaaaaaaacataagaaatccatccttcatcccaagatcgcaatttttgttcatcaagggggttgccctttcatatcagtcatcaacaagcaaagtgcagcccaatctgagcccaatcaatagccatcatgagcaaacttcttcgaagagcggcggtactcatcaggatgggccttctcggccttagctttcagggcactatttccagccacgtgtgtcagccttctagaaactcactcatcggcgctaatgccgcaggcacggcgctgatcgacaggcacatgccaagctcacccagcggagcggaagcccctgtcgcggagcggagcggaacttgcacgtccatcgcaccacaatgcctggttttaggggtgaatttgcttacctgacacgcttttgcgtccattccaggtcgcgctttgtctctcttgcggttttaaggccttcggagaaatttgctcgtgcgccttttagtcgtcgttgggcgagcgcttgtagctccagcagttcttgctgttttgcgttcagctggccagatctgcaagtgaatttcgctgttagcttcgtgtttgaagatcttgggatatcttcctgggtcttgttttgtgaagcacaatctctaggtggtggtgatcgctgcggggaggaattgcaaatgctgatagtgttgcatggaaactcacgtctgcgcctgtcgtgccagacccttgtccaatggtgttggatcaaatgcatcctgcatgcggtcgcttaggacatccacgacatcgacaccggagtacgatgcaaagctggagtcgtactcgccagcagagctgaaggtgagcccaccagaggaacgactgccggcggtggtgcttgcatcagagaagtctggtggggagctagagaccctggaaatggggtagagagaagctggtgccggtgccttggagggtgcatggtggtatgggtaggcagcaggctggtaatagtgacgctgggtggccatgacgacgattgactgcaacaacagcaagtgttataatggaagaaagaggaagtatgaagctcaagtggacttcaatgagataagaagaagcaagaagatgggaagaatgtggaagaatgtgtaaacaggcctaactaggagtgatggtaaaggaagaagaaagaaggactgtctccccgggtcagacgagggattttataatcctccgcggggagtcttctgtccggcggatgctcccattctatcggatgcgaatgtgatgacaaggattgcgcaagcctcgaaggagccattggaccactcgggacacattgactcgcacccctccctctgtacctccaatccgagctccgcctgcacgtatgtctccgtatctgcccgcctatttgcctcttggaccgccttgaccccgctcagagtggaaaaaagactcaatgtgtctgggcgaggacgccagccttcctgcattagggtttccaccgttgagtggcggcttggtgcaaaataggtctcgatctacgcccctcttcctggtttcaaatttcgggccaaagcgcggactaggactattcagcaattgactagaaagggcgttcgatgaggttgggatgggtggagttggtggaaaggtgagatataaatatgaccttcgccgtcattcctactcccactttttctcgactcttttttctcttgatttctcacaattatccttttcccttcccgctctcatccccgttgaattgattttttcttcagaaattcgggggctgggaagaggacgatgaatgttgattcgttcgaacaaagtcaaagataagacggactacacaggagccggtatgacatatttctccattcaactgtcaaagtctaacatgatagttagttcatcggcttcctatacatatacacatgttgtagttgtataattgtggttgaatacgcgcttccgcgaaaaccaaagagattcacgggatgtctcgcggccttacatcgtcgttgggatcggagcccaagagcccgaaagtaagatcgctgcattcaattcaagtcacacggagaatgttggacatcactgcatgaataacaggaccgtgaggaatattggcattcgaaactgctcccgactcggtgaccctatgcttcttttggaaggttctaacaagaatcatcctagcaatatatgagcaaaaagggaaaaccgtgtgaccaatgcgcaacaagtccaggtccaatgacaagaggaaaaagaaaaatacacaaggtgaacgttgatccttcctccgttttgcccgcctggatgcggctgttatttctgcacccgacgagaaagacccccctctcgcacgaatccaccaatagccattagagccttcgacagcaggcaggacagagggaatcatcgctgcatcgagaagcgctctagacgcccatcaacgtgggaagagcacgcagctgctccccactctatgcatatagtcgatgacttgcttgacaatagctatggggcatgtatgataaagggaagccatccggcaagccccgtccgaaatactatatttcgagagatgctgtgccgcctatgaccgttcatcattggtcccagataattgctgacatcaagacgacgcagtgcctaactaggtgggaaggaaatgggactgcaaggcatacccttccaggtgggtgttctacactgaaactggatcttccttgcgcactctaaatctgcttgttctcttttttcccgcccgttgatgcctcactatgcctaaaagccagcctgcatgccttacagcctgacgattcacgatatgccccgtcgaccgaggaaccctgtgacaccaccgtcctcaatcgatcaaaaccatggcttggtgaatatcgcagggatgccattcgtctctgctgaaaatggccgagcccgatctcttattcggctaggccaacatcgggcagcacggcaattaatgacgcacagtacacacttcggcaatacgcctctttttgtctgatcttgctcttcgtcatagtcttcccaccaacttcgtcctgatcagcccccccttcaactcggactccggacccaaaggtatattcttttgaaccttccaatgttaatactccggataggtacgatgtcaactgattttccttgcgtcggttacacaagcccgctgttttgatccgaatgtgttgaggggaatcccattcgtgcctgtttttattgaccatggcgttcaattaaagtcctttttgcctattagccgggtgtcgacaattcttctactaaatccaatccgaatccaacaagtttattattttttcagcgcacaagtggggggttgcggggattttctacttccttcaccgccacatgcgccatggccaactcactcttacccttttcgggaagtatctatcactctgtgcctaccgagtactccgtacatatatgtactgtactatcatcgggatgatggcaaaaataatgttcaaaggattggaatctaggcgcatccctcggtgtttacttcgttgaatgtatgctaaatcaaacaaaacaaggattgtcattttctcgaaaacactaggctctagaatagctcatattttcagggatataggagcatctcacattgaatcttctaagagtatacatactagattcaggtacaaggcctctcagcgggtttaaatacaaccactatatcgacgtgatggaaagttcataaagatttttagtgatgtttcctccgtagtcctcaacgatatagcgcgtaatcagaatttccagttgtagaagtgctcaataagttgaaaatccacaattaaccttggaaatggccaattttctgctggcaataaaagccaagagaactaaagcccccagtcgttatgcactgcgagacctaatggccaccacagcgtctgtattggggtgatatattcgtacattcccagtgattgtctttgtttacagttctcgttattaccacactcgagtgtcattagtagtagcagtagcatttctgacaattttcaagattgttggccagctgtacatggctatgtatacaatctaagtcttgctactactagtaccttctcgcaagtcgagtgcttcgcttcagtattggttcgatgctgtagagcttaaaattatcatttgatacttcagaaaacgcttaagttcggagtggagacataatctaaggatatgtgttgagacccttcccgccttagattgataggactccctaccttgtttggtcttattcttctctttatctcagccagccaacacaatacaacccatcgtttcctttcccatcaatgtttgggtagatctattgtggacgtgggcattcaatcacgtcattgttccattgtaagataactagttgcaccagatgtggctttgataatatttggggaattgttgctccccctccctgaatttctagtaccgccttcctgatttggttgagtacttgctcgacacttgcttctgcctaccgctgtcctcaccgcctcttaatttgtacaccgcctttgtatggaaatgcatatgatagtagcaacaggcttggacagcaggtatctatagcatgtattgaagagggaaataaacgatgggcagcctggctatgcaggcaagatgaaaacgacataacaccaccaaccatccgggaggggtcagctagcaagcatagggaccacatagaccacaccatagtatacaatctcctagtacacaaacatcttgcgattctttctcatttctggggtgatgtttcgtctagaatatctgctccccgaaactctacttgacatccaggctctcgttttctctgcctaaaggacaaggccactaaactaggcattccgactttccccactgcaatatgtaaacttttaataaaagtaagtcacttctatcatagcttgtatcaactgcttgatccataaagggctgaatcacacaggacgcaggtagaatatacgatttttcaaccaaaattcatgtctttttacaatgaaaccagaagtaggcagaatatatggcataatcacgagtgggacccgatcaggaaggcggtactgaaaattcaggcagcgtagcaacaattccctagttagttaactagttatatttgacagcaagaagtggggagagtgacaatcaacttgaggaaagaaagggggtatgtctacatggagatttcgagtttgttcaagcctttatgactctggctccccaacacgtgcgagagccttcagacacgaaagatgcttatcctgatgcagggcatcgccaccattcttgtaagccctgaggacctctgaatccctttgtttgattatgatgaccatgtactggattccatcagtggcaagctcttccagggctttctcattggcctccttggcttcttcctgaatctcgtggagtcgcttcagccagaacatgtatctccatggcgaaaatccagcaggtgatcgctgtccgagctccgattcaaggaacttctcgccacccttgctgatgtcgctggggcattcgttccaacacacgtctgatagtaagaggaggttgtggtttccatttttcagccaagcaacagcagctggtaatagttgaaagacctcaagctgatagataccacggttgaggtcctcctcgtctgactcgctctcaccccggagtgttttagagctttcaaaaagatcacggaagatcagaagtgcaacttggcacagcctatccttagcgacacgagtggatgcgagtttggctaggaatgttgcaaagttgagacggtgtgttcccgacatagaaccaccgttattgatccagaactcggtcatatcgctagccaaaaaggggagatcattccaaagtgtcccgtcgacggttcttgcgatatcaatcccacaggttcctcgtgaaggtctagtcaacggccccattccttgaatgcggacgatatcgaggactataccctcatgttcaggtgattcggaggagatatttcggccaagctcgtagtacatataccacagggaatgaatatggccttcaagagtatctaaaccatcaccaatatcgcagtatcggctggtaacgacccaggtccggtcatagaaggctacatctcgaatttctttgaaatcaccccgagcgatagactggcgggtactttcctggtctctacgagcatagtcgttcgttatgataataggagcacctctaggcagagagctcagcagagaatcacggaggtgttgcattttgggaacctgacaatgctgattgatgattcaactagaattcaggtaagagaaaaaagacagtaggaaaacgaaaggattgatatggtggagccccgcgggggcttaatgagaacccccggtactaggcagcaacgtacagctcaccaatatctgaattgttggacttcggtatgcgctggcaggatgtactgttttcttcgctggttgtcgatcaaccagcaagacagaagtgcatttcctaatagactgggtggccctaggttgtggccctggacctatttcgacctgggatgatgccccagccctatttctaggcgagggtactcgggatccggttcggcccggcccagtggatacacacggtggtctccactccaaggtatcttgtgggagccctggaggtcttacaacctcagcaaaggttccggaattatttttattaggagcaagggtgactagataagagggcagagagcattcgatgcctttggattgctttctcaataaaacgcgccggctcaatgaactctactttgcctgactcgatcgaaaagccaccactgagcgtggatctttggtgaaacacattctggcagatataaaaaccagtcatcttcctcgtaagggcgaaggcaggttgtacaccggacagattcaaaatagtcagggtagaacccgctatattcccagtcaagtatcccagaaatcacatacttgttgtcggtcaatttaaccgtgatattgtccggtgtgatgtctccgtgtgtgaacacgatgcgagggcccgaattattagtaaacgatggtgctaattgacggagaaactcgatgaacacgttgccgcctggatgcgggcccaagaataagaatgtttcaaaatcctcaaggctgaagataggtgtctcgctcactcggacatgcctcctgagatctctgcagccttcacctgcaactcctcctaaaggagtgccttcttcaaaaggaagagttctcaaatctgtaagcattgtgttgagttggttgctaatagaggttttttgatcagagtcgagtgtatgccagacttccctaagcgttgtagatcccatatgactcatgaatatcaaagaaatcccgctcatacgtaccaagccaagaggctttggcactggaatattcggcttatgacggtcaagatattgtaaagcggtatattgagtattgtgttccatatagcgaacggctttgataacgatttccgaagagcatttgaacactcctttgtggtgaaagaagggagctttgtaaataatctcactgctctttaggacttcaaacagcctttgagagagtggcaatccctcggcagtttgtgatattggttcgagtaattttgcaaccgcatccgaaagaggaaacacaatttcaaccgggtctgatgggcaaagggattctcggatgtcttgctcaacgtatctgggtttctctggcagatgatgatgtcagctatgcgaataaggagagtctaaattgcggtattgtggtgcttactggggctttcgattgtggttctcattctcaaaagacgttccaaatattgagtggggaattgatcggccaagtcgacctctggatctttcgtgagtgcggcttgtagctttttcaatgtacgggcattgaacctcacggcttcgctgacagattgagtttcgctggcaggccgagcttcgttggcaggttgagcgccctctaagtcgaacgcccctttttcaaccatcttccgagacggcaatctgagacctcacgataaaaaaatagaaataatgatctcggatgcctaaatggaagggaggataagtaggtaaaagaaaatggtgactctctagtctgctttgcatgttgtaccttggctacaccgccattcctcccatccctatagcgagctatgcaggccgaggccgagcatctcagtcgacactatcgcaatcgttctcagtagggcaaatgtcacaatacgtactatgaggaggactgcctctacccttcaacgggcctcgaggttggatattactcttgtatgatgcaagggatggtgaagttatggatagctaacatgcattagatgattccctctcttttaccaagctccgagctggccatcgtttctcaaccgctgcaatcacaagagtcaaaacaagctcaaacgcaaagaacatagccgcaatctgatatccgactttgaaatgtggcgcctggctggtattataagccaatagaggaacccaggcattgaatgtgaaggcgactgcctccatcaccccaataacaacaatacgatgctcagccgagaaaccacatgtctcactaacccaagacgtgaaaataattcctgcacccgtctcaacataagtcaacagccaaccagccatcattgctgcggtgttatgcaccggccaaatagagagaattatagtcccgaccaatgctggtagacaagcaaacacaatgacaagccaacgtatctgcaaataatcgcttgtttaggcatagaggagcgtaaaaatgatttgcagtccatacccagcagatgggatgacgttgacttgttcaactgtgtatctgccggttgacttgagccacacgttgaaatacgagtagatgcgcaagccacaaacgtgagcaatgaagactgtaggaatcaaccacaccggccatgagcgaatgacatctaggaatgttctccatgtgagtttcgaagctggtgcacggccaacggcctccattctctgcgcggcatattttgtatcttacttgctaagccatcgggttttcgagtcattcggagaatcaggaatagcccgaaagccgtatagagcaatgggtactctaagaataccataagaaataaacaaccgctgccaagcagagagacctgcgcggccattcatatccgaatacagcgctgcctgaagatatcccgaaaacatgttggaagcactagaggaggcttggaatattgcgctccgttttgccagttcctgtggtgtataccaattccctagaagtgtgatgatgcccggataagcggacgcttcacaaagtccgatcaaaaagcgcagcgcaaagagcgtttcaacattctttgcgcttgcgagtgccatgacgaatattctccatagtagctcaagggctggtaaccaaatagacggcctgatcttggtgaggaccagctgggatgggagttgcccgatgagatatccgatgttccagtatgtcgtgaggtagttcaggtcattgccctttaggtcgagggcttctttcatacctgagacgtaggcattggaagtctgttcatgccaatatcagctttgctttatccgatcgatgggtcacttacattggattgatctaaagatttgataaaatatgcggtgcaggcgtagctcaatagccaccaatccacctgaacgagtttgcgctcacggggagatttgtcccagatgtcccaaatcgatgccttcagacgcgctcgcctagcttgcggtatagacacctccggctcattgcttggtcggtcgagctcctggtccttgacctcatgtcttggtttcaattgatctccggacaacatagtctctgaatttagcagtgagtaatgtaatatgttctacatatcaatctatctcatttcatttcagtaatatttatactacctagcacttttgccaattgttctcggacaggcacatcatagagccctagcggcgcggctccgacaggttttaccgcattgggacgaaattgcacattatataagcttatggcgcaaggcaacatcccatatctgagcattaaatagcacagctactgcaagaattcttagtctttccacgaatcattatggaaatcgaccgggtagctgttatcggcgcaggcccctgcggcctaggagttgcaaagtatgtgtttgcctatcgagacaaagaagaacgtgaataattaatagtatgccaaggtatcttcttgctgaacgaaaattcaagtctatcacaatattcgaacagcgcgaccaacctggcggtgtttggaactacaccggcgatgagggcatcagcacatcggcacttgcccgtcccaacccgagtcaggagcctcaacagcccgtgaaaggaacttttgcttcccctgtatacgacgcacttgaaacaaacatccctaaatcgttgatgcagtttaccgagtatccgttccccgcggccagtgcgctattcccagcccataccgttgtgcgagactatcttcatcggtatgcagaggaattactgccatacatacgtctgaactctttgattttggatgtcacactgtcaaaaaagcatccaaggcccgagtggactgtaacctggcgtgatctgcaaactaatgagattttggtcgagcaattcgatgcagtggttgtcgccaatggtcaccataatgacccatatatccccaaaatcacaggcttagatgagtggagtcaaacctatccaggctccatcatccattcatcttcttataggcgtcccgaatcatttgcaaacaaggtatgtacccaacccgccctctaaaacaaacaattactgactaaaaatagaaagtgattgtcgtcggacactctgcctctggtattgacatcgcgaaccaaatcggccgtgtatcaaaacacccgctgctgatttcggaacgcacggcaacaaatctctctccacaacaagccgccgttgcccaaagccttcctgaaatcagtctcctcagtgtcgaagatggccgtgtgcaatttgccaatggccatgaagagcgagatgttgatcacatcgtcttttgcacgggctaccacttctctattccatttttgtcaagtctccagccatctatcgttacagatggcgtgcgtccgcatcatttgtaccagcatgtgttttacagcaaagagcccaccctcgctttaatcgggtttccccagcggattgttccattccccttcagtcaggcgcaaggggcatgggtcgcgcgcgtcctggcaggacgactctcgctgccttccgaggctgaaatggagcggtggattggcgactgggtagtaactcgcggcgagggacgcggcttcaacacccttgcctttccgctcgatgcagactacatcaattcgctgtacgagttgagctcgcatgcagctcggaaggatgggttggagaatgatgggcgtggtaaaaggccgcccttctggggtgaaaaagagaagtggacgcgtgagagattcccgttgatcaaacaggcgtcgcaggtgcttggtagtcgacggggtgagataaaggctttggaagaccttggctttgacttcgagagggattatgttccagatgccgaggcgcgtttgtagactgtcttattgcctcagataaagatggactagctgttgaagctactccaatgaaccgatattagaaggggctagaaagatgtctcaaatgatgtcaagaaagacacaaaaataaccggtgcaaagacatagatcaaacgatataagaatcccgttagactctctagagttaacatagaaggtgcagcttgatcggaatcaggaaacgaaaaatataagtcccattcagagcatatcagatcctacgccacccagaaggttcatccaatgcgtctcgaatgcagtctcacccatattgtcatctgccggactcccaataccaacgcgagtagcaaaatttccactatcaggcaggaaattgaagctatgcatagtgagagattgagaaactcgtctctctgtcactttggacctcagaggccagatgtaaaagcttgcctcgcccatggtttgcctcagcaatacagccaagtcatcctgtattgattgcagtcccaattcagtatccagactcgaattgggcatcacagaagacccagataattgtctgcgtggaattaagggactcttctgctttgttgtaatatccgcgaggcgcctcaaaatccgagaggcttcatgtgcagcatgccaagaggaaggaaatagttcaaacagcgtcacgagaagatcaatctccggaatgtcgtcaaaggctgcccaccgagcagtacagtaaaggaaaattgctgccaatgaaaggaggcgacagagggtaatccaattcatgggtagatgtcggtgttcatgcaggattagactcagctgtatgtactgctgcgcagcagccttgaggctcggcaggttttcttcggttgtgtctccctgtgcaggagtgtacaacagaagaagcaagttttggtagcggacattgagccatgttatggtagtatgaaagggaagctgatcctgttctgataaagtagaacttgataatagacatccctgtgtataccaatcttcgatttggaggcgtaggtcctgcggacgcatagaaggatgtggatcgtaaatggcattgacaatgcgtgtttcgaggcgtcgtagagagatcacatgccggctgacttgtagcgctatcgcgtactgatgtccttcttcggaaccatattcatgtatcataatacttggcagcggtatccgcattatactgtcagggaaggcaaatggaagtccatacgatatgctgatcatgcgagtgaacacatacactgaccaacccagccgacgacgtagctcaagtacccgaggcgagaggctctgattggtaggagtttcgttcatcagtccgactgctagagcatgactggtcagaacgccggtaatggctcgagggtcctggtcgcagggtacgaagaggagatacaagccgaggaggagcaaggtgcccactgattgctcattcacttggcagacacactcgcagagcactcttttgagacacggctgaaaatcccgttcctcgatgctttgcacttctccagcccgctgcaggcttgtgaagccgatggccattatcatgtagagtcgggtgggcacagccgaccgggggagaaggccatcgtctgcttctttattggcgagtgtttcgaaatctcgaagaacaagttcgctgtcaagaaatgggtatgtccgatgaacgtgtcggaaataggcctgcaagcatttgcgacccgctgtaacggaaatgggcccgtcttcctcggctttggaagtatggctttcctcaaaagcactctcactgggctcgatttcactagcatcaagtgatgaagactgcatcggggtacccaaggctatatctcgcccggtctcgatgtcttccaccgatctaccggcggggagtgtttcattaacaagctggctcagccaaacaatgcgtgattgcaattctcgttcgcgcgtctgcggactcgcagagcgctccatcagagaacaaggtagccaagcaacaagacatggtttgcaagatcattcgtctgttctggtgcaccgcttcttttgctggcgacagcggcgacacgccggtaaagggggtttacggccgttggtatctgcgggtctaccccgggatcgtcgtgtctccggttttgaagaattgcgatggactcgaaagcgatggatggagccctccattattgccggatgaaaagggtcaatttcggggagacaccgtgataaccaacggagcacgccattctttcccgcaacgagaaatacccatcggtgccgcaccgcgttgtatattcaagaacatgatttctcgcaatgtattcatattttctttcattttattcttctccaataatttactcccatcatggtatctgaaaccgaggcggtggaaatctaccgcgacgccatcgtctttgacgggttgaacatcgccaactggtcgcgcgagatttttgaagcatggcaacagggcggcatcaccggagtttcatgcacatgcggtaccttggaagggttccgcggcgccattgccaacgtggtataatggaagaaatggttcgaggaacattccgacctcatcgtacaggcgcactcggtcagtgacatccgcgaagcaaagcgcaacggcaaaaaccgccgttctattgtcctggcaaaacacagccggcatcgaagatcaactagattacctacgtgtcttccgcgacttgggtgtgcgcaagatgcaactcacctacaacacacagaattactctggagcaggatataccgagattcgagactcgggtttgactagatttggtcgacaagttgttgatgaaatgggtcggttgggcatcgtggttgatttatcccatgttggtccggtgactagcgaagatgttatcgagtatgcgtctaagcccccttgcttcggccatgtgttgccaggtggacttcacgagcatccgcgtaacaagtcaaattatcttttgcggcttattgggaagaagggtggatttgttggaatcagtcaatttggaccgcatatggccaggggcaatgaatcgactatcgacgattatgttactgctgtggactttgttatcgatttgattggcgaggatctggtcggcgttggttcagatgctagtgagggacatgcccgacaagtgattttgtggcctggtgtaatctagataaaggttatgcgcgtcgcctcactccctggggaagccagacggctgtgaagcctctgggcccgttgaaggaacgcccagaactggccaaggctatggctcgggcaggctggtcgaaatcaaagatgcagaaggtgttaggggagaactggctggattatttggaacgcatcattggagagtgatgctacatatatttagtttaggtaaaggcaccggtttcagtcttcgatactcatttatcccgctacatcgatcctcaatgatgtatattcccaatggaaaagagtttgaatgctttaaagtattcctaaggtgtgataatgggcacgatagattggccaaaagatatgtagaacacacaaaggaatagaataacaaagatctaaaagtgtcactgttttataaacgcattgaaacacatcaagtatgaacaccccaacctcctccaccagggctattgatttgcataatctccccggcctgcagcgcgagtgcggctttcccagtaagagaaagtctctccaaagccgtcttttcttcgttccacttgaatgcatagttctttcccacagaaccaggttgaccaccgttcataccatacggagaaaacactcgccgatcactgagaatgctgaatttgagcggaattctagcctcgatttcacggaccgcaccattccctcctcgatactcgccatctccgccagtattggggttgatcgcatgtttgcgaataatgacaggggttcgcttctcaacaacctctgcatctgtaatcttcgtatttgtcgagtgcgcttggatggcatgttctccgtgccagccaggtccagcaccacaaccgcctcctacggtttcgccataattccaccctggttcaataatcccagtggcaggattcctccctcccatgccccagccgaagctgttcgcacagccggaaaacgccgcacagctctcgaatgctcgcaagattgtgtcaattacacgctggcttgctagcgtactgccgcatatggccacggaggcgctgggtctcagaactgatcctttggggatgcgaatatctataggtgatagacagccatcattgagagggatatctgcatcaagcaggcaccggacgctgtagatcacggctgaatgggtgatggatatagggcagttatagtttccccacatctgaggaccagtccccgtgaaatcaaacactgccccgccagcttcatcgatcgagatagacacttttataacggtgccatcatcaaagtgatcactggcggtcaggggcatggtcctagtctgggaaacactcttaaggtattctctgactgctgtttcggaattcctttgaatagcattcatataacgatccacaaaagggaaagtgaattcggcacacatcttctgcaaaagaagaataccacgctggtttgccgaaatctgcgccttgatgtcggagatattatcgtccaatcgacgacttgggctgcacccagggagatcacccgcagccaagaaggcattgcgcacatccgtttcaaggaaaacaccattatccactattttcatcgagcgaacattgaacccttcttgccacagttccttggagtctggcatcatagatgtgattccttgtccacctatgtccgtatggtgaccacgagccgcaacatagaaagcaacggtggtctcgccgtccacaaagacgggagtgatgatagtcagatctggaagatgggttccaccgcattcagggtgattgctgagaagaacatcgccggccttcaactttccttcccatagacggtgctggtattggattgcatattgcatgcttccgaggtgaatggggatatgcggggcgttagctactaattttccctcccgtgaaaagatggcacacgagaaatccaggcgctcttttatgctggttgaaatagaggtgcgctgcagtgtgtagcccatttgctcggcgattgccatgaaccgatgagaaagaatggaaagctggattgggtcgatagtctcggactgagctacttcggtattggagggggttttagtctccgatttctcgaggaccaggtgatttgggaggaggaaggcatcaaaattagactccacgaatatcgtttgagtcgcatcaatcaacaaggcaggacctcggacctgagagggtcgccggattgaggcaagttcaaatatcggaacgttttgccactctgaatcgaaatatacagactgagttcgatcagcctgcagatagtcatttagagacttgacttgttctaactgcgaatatggtgataattcctcgatagcaacaccacttcggccaacaccacggaccttgatcgaatcgatctgtatttttctgtcgagaacgaatgcaaactctcgcagatgtgtggctataaatgaggctccataatcttcatccttaggtttgggcacgacaatgttggtgtctgtaccggtatatctcaaactcagggattcttcaaagacaacagtggatggatctgcgccctgtgagagaagggcagattcagcttgggatttcaggttgctgatatgagctcgaatgtcgtccagcactttgaaatcgaaggaaccaacaaaagggactgttttttcgacctgcagatcggcttgagaaattccgactgctgatagcagtgaagagtgtttgtggatgaggatccgcgtgataccgagtttgctagcaattgagcaagcatgctgacctccagcccctccaaaactgaccaacgtgtgactgcttggcgcgaatcctcgcacttctgttgcgttacgcattggtcgggtcatggtttcgtttgcgacatcgagaaatccgaatgccacctcctcgggtgtgagcttttgcccagtttgctcgttgatctcgcgagtgagttcatcaaacttttgtttggtaacatccagatcgagatgttggttcgcattcgggccaaagatacccggaaatgaagacaggaccagtcttcccaaaaacaaattggcgtctgtcacagtaagaggacctccttttcggtaacacgcaggaccagggtgtgcccctgcgctctcaggtccaacgacaaagagtccatggcgggcgaacagcatcgaacctccgccggccgcgaccgtcgcgatgttcagcatcggcgttgtgatctttcgaccccccaccgtcgtctccgtcagataatcgtattttccatcataccgacaaacatctgtgctggttcctcccatgtcaaacccaagaacaggagtcccttcggcagcatcaaagcaagttcgagcaatgcccacaacgcccccagctggtccgctgagaagagcttcatttccgcggaacttgtccgcttgtctcaagcctccgtcagatcccataaactccactcgctgaggaagtacactaaagccggtctggaacgccttaatataatcccgcacgattgggtacaagtatgcctctgatgaagccgaactgctgcgttgcaagaatttgatgacagggctgacttcggaagctttgatcacagtttcaaagcccatatcttgcgcgatgtcggctacctggtcctcatggccagaatacagataggaatgcataaaagagatgaccaaagatgtatagcctgcagactgcagcccgctcagcacttctcgaacctcaacgggatcaagtgctttcaacacccttatcacctccccactgggtgttcggaccagtgcaggatctgtgagtttggccgctttatctgaaggaaatggattaagatcatagtcctcgatagtgatgcgttcgtcaatttcgaccgaagttgaatgcagcgcaggaggctttctgacgttcaaggcaaatagcttcggtcgagtttgatcatcgatgacacagacatctttgaagcctttggtggtgacaaatgcgaaatctcggcctttgccttcaagcaacgcattggtcgctatggttgtcccaatacggcaggaggctattcgggacccgtctagcttttcacccactggtatttggcggttttcgataatctctagtgcccttcgaatcgcctctgttggggcgtcacggtagttctgcggatcttccgacagcaatttgaacacaaggtcatcacgaccggggatttgaaccaggacatcgcagaacgtgccgccgcgatcttggccgtttagtatggtttctttaatcgggagcggtatagagtcacgtaccgatggagatgtttatgcctggggcagtcgtcatggtggctgactatgtgcgatttgacaaagagctctgtcgcaaacgtcgccaaaatcaattggtctttaacattccgattgaatattgatatcgctggtggtcggcactaaaatcacgcgttatctcgtggttttgaggtgatttccccactcaagtctaggagtggatattattttcggaggttggccgacgtctaagagcaaatctggttcactatgccgcagtgtctaacagtaacgccatctccaatttgccactgtccactatttacatgtccacggttgaaaaatcagctatgcgaattcatcggagtctctactaggtagtgacaaaatatcttcacagaggttaggtatgcacgagactttcaaccctctagaaagactgttatcaggcgccaatgaaaggaatgtcgggagagcttcagatacgatacaatatatcatagaacatagatatcttcattcagtggtcctatctctttaaagcatcaaccttgctaaaacataccggctccaaaagaaggcttacgaaagatgtttctcaatgagtccgatcacctccgcattcttctctagatgcacgctgtgattggcattttcaataaccttcagctgcgctcctggaatcctcgaagcgatatccttggactgttccggtgggcaaatccaatcgcgctcacccacaataaccaaagctttcgccgtgatcaatggaagttggtccctataatcgaagaatttctcctgcttggaatagaggtcatctttgcgcggtcagctttattctgtttggaggttgagaaaaactcactgtgggactttgcataaaagacggtctcgatgttgtgcttcaacgcgagatccgggtcaaagttctcgctatatagcggtgcagccgcgtacatgacaagtcgaaattccagatcgctctcaaattgaccgaatatcttatctttcaggaaattgatggaaagatttggggctctagatgccctttgttccagagtacggatagccgtttcttcatcttgtaaaagttagaaaagacgtcggatgttgcacgaaacttatagtaacactttagtagcacttacggtgatgtgaaggagcagttcctcgaagaatcaaatgggaaacctgagacggatatgtgattgcatactgctgggctagaaatcccccaaaactaccaccacatatgatacagggttgattaggtccaagaaaatggcgccttaaaccttcaatatcttcaacgacttgatgaaatgtgaaaggctctgttcgtgaactttgaccatgtcctcggaagtcgaaagaaagtactcgatacgaggacgaaagggatgagtatgctttgtaatctgacttatggtcgcctgttacattttatcagtgaccttagaacgtttgattcataggagtagactagaggctaaccaaaacctcgcccaccgtgtagagtgattatcaacggtgcatctgcaggtccgattaatcggtatgctaactgggcgccattgatagagacgtattcaaccattgtgtgttatagcaaatgtaagaatggaggtagtgaaatgagataggaatgatcaaactgaaaatcaatcatagataatagataatagtcgaaataggaaattgagccgaagccggggagaagtccaacgccaagattgccaagcttatctcgtggtgtcggccccgctccgagaaatatttctgtaagaggaagatttgagcggatcggccattctatctcatctttggcacggagtccacgcaacaattagtttaaatgtcgtgataaggttgtatatgctttttttgttgcagttgttctagaatatacaaagtactagtacattaaaactcctctctcccttattataaatgatcttctcgtcacaaaaggaggatctgaaatcctttttgactcgtcggacgtttgtctcacaaatccacaatgactaaaccagtcgaagagatcggggttcaaaagccaatttcaactcctaaagaattggacagcgaccactcagaattacaacaagaccgccatagccaaacggattcatgtcagaatcagtctgaaccccccaaaggttggttccactggcatgagcccggcacttcaaaggccgacaaaaaactcattttcaaactcgactggttccttctgagctacagctgtctgtgctttttcatcaagcagttagatggaaacaatatatccaatgcctatgtctccggcatgcaagaggagcttgggtttggaccaggaaacgaactcagctggatgaacacctattttaacattggcgcgattgtcggagggccaatctcaaacatggccttgaccatgatccgaccgcgatactggctgcctggctgtctgcttacctggtcgctcttcgtactgttcttgtacaaatgcaacaatgcatccgcgttctacggtcttcggttctgtattgggttcttcgagtccgccgcctggcctggaatccagtacgtccttggatgttggtatcgccgatctgaactcgcgcgccgaagtggtctcttcgtcgtgtccggtgtcctgggacagatgttctcgggctacctgcaagcagcactgttcaaagacatggatgggaaagctggattgtcggcgtggagatggcttttcatcttcgatttcatcctcgccatcccggtggttatctacggctttatattctaccccgatacgcctcacaacacgacggccttctatctctcggaatgggagaggaatcgcgctcgccagagaatcgacgaagaaggccgaactcccgttggcaaattggaccgctctgtcttcaagcgcatcttcttgtcatggcaattatatgctttttccgtcggatacgcattgtggtctctcacatgtggttcatacgtgatgcagttctttggcctttggcttaaatcgctaaagacatacaccgtccctgagattaacagcatccctacttccatgggagccatcaactttttcttcatgattggtacgggatatgtcgccgataaaattggccggcgaggacccgtctgtttcgcagtcgggtgtcttctgacattctgttttgctgttttcacggcttggccttcatcaaatgggttgaaaatggccgctttcattctttccggctgctacggatgttatacgcctctacttgctggttgggtcaatgcgtcatgcggtggagatcaacaactgcgagcatttgtcttggcgtttatggtcagtcttggatcggctgttgttattccattccagcagttgcagttccctagtggacaggcgccaaaattcaccaagacacacggctgggttagtgggctgtgttttgttgtggcattgagtctatggactggatttggaatcgagattgtcgaacggattatgacacgtgggaagcgcaaggagagcctacctaaggaggaagatgtatgatgctgttgagcatatggaatgttcatattgtgattcgtgagagatattttgttggttcagtaatatatatacatcctggactatttcaaaatctttatgactgacccgccccattgttgacttataagtccttttctttcaccttgccaagtttagaatcatcaaaaacccagcattaagtaatcctctatacaaaactatgttttatatagagtggtttgttactcttgcggtagaactatctgccctattacagccatcttatttagacctaacaagactacttcccatgatgggatgcagcgtttaaggcgatcccaatcgtacgttatgccattttcgtagctattgtctgcccactggtcgtatggacccgccgttattatgccacgtttctcgtctcaagggtggggctagaaccgaactagtgttgtcagagcctatataatgtctcagatgagagacccttctttcataaaacagctttttgatatatgacatctatgtgagtagaagtggctcattacgttataataagtcgtaaatagccaatttttgctggcaatgaaagtctatggactgcgatattcagatgaatccgagcacatatctatctgccgctcgagttcataattcaacccgtttctctagtgcctgactgccttcgatgaactaagtatagtgccgttctctttaggctcgagacgtcagtggaagtaggagaactcaggaagtacccgggatcggcatggtcggagaaggggccacatttctcaccacacataatggaagtagcggaggggctggattgcttgttcaccataaggcgatcggaagtgggttaaaatagctataaatagccagcgaaggaagagaaaaagctccgcaaagcttctatgccagtcgatgtacttcttaagaacgtacgacacggcattcacgagtggatccaaggaacccaagggacaaggccaaaactaaccaaacggacgtccggacaccaaccactgggattaacctcggcccaaagggccttaaatcgctgctatggctggcgttatcgggcgggcttgatagtagtggcgatagcggaggtagaattatatttcttacacgacacatcttgagatgtcgttgtggaatataatcttttcatctgctcgtgcaaaattgaagtatagaaaccacttcgggggagacacaaacgcaataggaccgaaatccctagtagtcgctataaaatgcgatgctgagccctgggcatcatcatgcgcgtcaggtaaataatagaagcaagtggcaattacgatttcaacttcagaaacgacctatagatataaataaccccgagtagcccaattaccgggcagtttgctccatccaccaaccaaacgccaaagcagaaaggatagtaaaacgcaggcgaaaagacagagaaaacagagacagaagtaaagtgaacagagttggattattaacaaatacagatccagaaaatagataggtgccatacgctcataatctggtatcacaagaacgtaaagaaaaggcaaaaaggaaatcataaaacagaagggattttacttgcttggtaaaccaaaagccaagcaagagttagagtactgacgccatgatgcacaggaggcaatctgtacctgtgcaaatgcaaatgtcataatgggacttccaaaattgaggagaatcagccccaaaatgtaaaagagcacgctccacacgtgtctagcggacttccaatggctcccatgtacaatggaccaaatccgaaaacacatttccgtccaaaatgaatcaccaaaaagtcactccgtggtccatcgcaaggacgtcaaatgctagaaccggaaagggaactggatggctagatgggcatatatataaaaaaaaagaataataaaacaaagcaggcttttaaaaagaaagaaggggggtgaagagggcaggtaaagacccggggaaagtccctagcggcgagtggcgatggcttgttgttgttctgggctaagacggtctcgcagaagcatcagtgggcgaccgggctcgagaagacccatcatcatcttgcctaattcgttgtgtttgatgggcttggtcacgtagtcattgaaacctgcgcgggcagcgttttcaatttgatctgtcattgcgtttgccgagagagccatgattggaatctgtggataatggttcttttgctcccattcacggatctctctacaggtatcgtagccattcttgataggcatctgaatatcgcactaccattcgatgcggttagttttgccggagggaaagggtataaagtcaggctcacgatgataagagaatagtatcccggctctttagaaagcaccatgttagtgcactccagtccattggatgcagtctccgacatcagcttgatcttgtccaaatacttcagcataacctatatatgagttagcaaccaattcaacgaggttctcatgaatcaacttacgtcgcgattggtttcgtcgtcttcgaccagcaggattcgataacccttgttgcctaaaacttctttgaccatcttagaaacggtcttgaagttgttattgatctcgcgcgccatgtcttggttgcgatccttgctcagctcacgcttgctcttgggatcaaagatcgttgagaaagcagaaggtttgataggcttcggcacaatgaaaacctgctttcctgaagctgctagctccttgacctgtgaactaatttgacgcttttggtaaaggtctgaaatgatgacgatgacgggcgcgggatttaagcccgggtctgacatgttttgaataacctccaagatatcatcagttgacagattcaagacaagatgtgtacaaggatgggcatcggaagtggactgcatcacatctttccattcgtcaacatcatgtaatgccgtgacctcgaacggaatctcatgagggacaatctgctcgatgtgctgctttatggcatgccgggagtttttgagcggacacagaattacgatcgagaaaggtccgtggacaggcgcagataccgggcctactggtgtatctggagaggcagattcaggtgacgctacgctgactggttcgtcgggctttgtaacggcaggttgggtccttgagctcgagactgcgtctgccagattcgtcaaatctgttgtctgctctaatggagaagacaggggtgcagggccaatatctggagtcgggagggcagaggatgtaactgataacgaggcagaaagtgtagtatcagagcttttgctggatgagtcggagtttcgggcggctagaggaggtgcttgtggataagaggtcgttctagactttgccggtcttcttgaagcgcctgaaccctggcgcatcaatttgggctgctcagagggggaaggtggcggaggcgcatcgaccttgacgttaaaagagaactttgctccctggccctctttgctgctgggagtgagctttccgccatgcatttcgacgagttgcttcgacaggaaaagcccgaggccgctaccagcatgttgctgtgtcccattttctccaagctgactgaatcgttgcataagtcgttccgcatcttgagagctgaacccctttccggtgtccacgacctcaaagttcatgtatgcctgggtgtcattgggattcgcagctggatcccgatacatgtcacagcagatgtgaatttcaccatgcgcagtgaatttgactgcatttccgagaagattgatcaggacttgacgaattcggaaccgatctccaatcaccattgatggcaagtctttgcctatgagatagttgatctcgagacccttatcgaccgctcgggaggcgatagtgtcgattacatcctcgatcattgatcggatatggaaccaagatttgaccattgtcatcttgccagcttcgacacgggaaacatcaaggatgttgtcaactaactcacgaaggttagtggagctgttttgaatggtatcaagcattcgcctctggtcactgtcaagctgcgtatcgagtatgaacggaattgtaccaagaatgccattcagcggggttcggatttcgtgggacatgttgctgaaaaactttgtcttggactccatttggtgattcaactgttgcatggccttgttgagttctctttcgaggtttttgcggtcgttgatgtcggtacatgttccgtaccaggaggcttcctcgctcccgaaactgctagtcttcacgcgtactacgcgaaccagatgccacctaaaatcaccacctcgagaacgaaggcggatctcggtagaatagaagactcggccattctcatcttgctgcaaagaagcaatgccgcgcctgacaagctcgtcaagagctgttccgaccatgaactcataaggcccgccatcacttcgttccgcgttctgagatgttttgttgagcgacagttcaccacacttttcgagatcgtcaggatgaacatgtttagcgaagccgaggtcatgcgcttcctcgagcggttggccggtgtacagattccactgctcgttgacaaatatcaatccgcggttctccgttgcctcaaacacaatctgtgggatcgaattggaaaatgcacgatactttgcatcaatcgcaaacttttccctctcttgagttgcctcaagctcagcaatatgctgctcatgaatgtcgagaaaagacccaatccagtaaagtacctctcctgttgacgatagcagcggattggcccggaatatgaaccagcgatatgctgattcatcgttgaaccttcggaccctcactctttcagtgaactgtgcccccgtgcgcagagcattggcccatttggtatgaacatgctcactctcgctactatgaatattttgccaaggatctctaaatttttgctcctggtgctgacttcgtctgtaagcatcaaacttggaatttgtccaaatcacttcgccactctcgggttttgccaggaataaatgcaaagggatcgaattaagcatcagctgtgctatcgtgtcagagaacgggcgcgggagctcccgttgtagttgggcgtacaacgagttcgtagaggcatgacgtgatgattgctgagtaggtgaaagaacattgggcggtctgatctcttgcagtggtgatgcgacgtagaacgattggtcttgtaggttggtctcatcgctggggattgatttccaggccactttttcgggagaaattgttgtccttgagtcgatattggtggtcttagatctgaaaagccgtggtctactctgcaatgcactgtcacggacacttttgttttgcgggacattgaagtagctgtcagcaccttctccgccctgtcgtgaagccactcctggggacggatttgcggacccgaatccaatattgccaagatcaaatcccggtgtcccaatggcagaaatagtaggactgaacttaacagacgaacgatcactagggctattggtacttgcggacgcggacattgggttgttgttgtcgccaacggagtagctgacgtgaccgcttagtcccgcaacaagctcaagctcactgcttgcatcggagaaagtgccgccgaggcctaaaagttgaccatagcgaggtgtttccatcttggatgagagttgtttttcaagctggctatatcgctgagccaagcagaaagaatttgtcaaatgcggcatcagaagcgagagtgattgtctgaggttaggaggatatggaacgattgtgcacaacattgacacaatggcaacgggaaatctcaccgtcgatgaggactcccggtgagagtgaccaccatgtaatagaggaatatggataacggtcttcgactgatcgatgccaatagcctcaagtggaagattattagagtagtcgtgcgaaggcggatgcttggagaaagctccttcatcgacggcatggcttgtgaagaacggattctgctctgcgtgcgtgcggggagcaggcgatggagcaggggactgagaccacggagactgcggaacctgctcatattcatcatattgcttcaagccatgggcaccgaagccttgctgcatcggtacattccccattccacagccaaccggaccatcaacgtcaggagtaacttggaccatctcatttggactgttggcggactcagtccaacgctgcggatattgcgcgctctctgcatactcacgtgttaagatagtgggacgggtacgcccaaataacttgaccacgcctgtacgcttgatgagaggatctagttctacctccaatggtctaggaatggggaacacagcctgccgcatattgccgaggagactattgagtgattcgtctttggcttcggagttctccgtccaatcatccgtggatggcgagtcttgagaagcgatatgtacgtgccttttctcgggcttgacatttatcttcgaaagttgtggtcggctggtagcgtgaggggtgtggccttggcctttatcaaacccagcgaatgagtggcgggataataaagatggtcgagaaggtccaggcattctagcctggtggacggtctcgggtttctgttgcgagacgcttttgcgcgagtggggtgcctcagttgatggtctcttctctatatgacgtgcttgaagttcatgcaacgaggtatccacgttctggttaaatatcgccttttggccccaaggtacgttctccaaatcggtcacatctccagggacagccagcgacacacgctcagccccgtaatgtgtttgcaatatattaatgaggttggtccaccacaattcgagtcccgaatccgcattcaactgaagtgtcaggtcataaagatcgggactggcaaaattcggatcttcctgcgtctggctatgatgagcgggcagaaaggtcggatgcggttccgacgcttttggttctgaaggtagagtttggtaccctggtgtcgaagaatggagtttctccgatggaagcttcagtctgaatggtccacgtcctatcgattcgattcccattttggatggtttggtctgtatgtgtggaaagggataggacggcgtgtatgctggtttgcgatcggagggtgtctctatctggacacctctgattgtccctgcggaacttaccgagcctgcggaggtatgtgagctggtgaatggggcttccgttgaggtattagacaatgcacttgacaaacgtctctttcttggggtatcattcgagggggcggaggcgggctgattctgagatgagactggttgggtttgctgcatctgttgatatacaaggagatcttccatctgctttcgcagttccttgagggtatgtgaactgcgtccttgatcctcctgtcgttcgacttccgatcgtgcgtcctcggtgatgggtgttagaccaacaacctgctccgtagaatcgccgcgcgacaaacgagacgggttgagagacgacttctcaagagcatctaccctatccgcaagttcatccaccaatttttgcgactggtgaccatgtgggggacggtgaccaggcgatctgagaggttgcatagacactgccgatggatgtgtctctgatggcgaagggaatggagaactcctcctactatacacatcctccattctcacgcctccgcgagtggagggaaagggtataagagggtatcaatggtagtgtgcgaggtacgggaccgaacgatgtgagacgtttatggcttgaccgaagtcgcaaatgggagatcgggtattggtgggtggggtggtaaggacgccaaaggaaataaaacagattatgccaagattagaatctgaaggtgagagtcgggtcgatttagaataatagaagaatgaagacgacgaagacgaagacgaataaggttgaggcggtgtatcgaaggggggcgaccgatattgaggtgttcgagcgagaaaggaacaatttaggaaacaggcgtacccgccaggcccattgcttgcatcgatatgggagtggatgggagtggatgaagggaagaaaaagtggactgggggcgtgatgatgcaccggggggggggggggggtnnnnnnnnnnnnnnnnnnnnnnnnnnnnnnnnnnnnnnnnnnnnnnnnnnnnnnnnnnnnnnnnnnnnnnnnnnnnnnnnnnnnnnnnnnnnnnnnnnnnnnnnnnnnnnnngggggggtggagggggggggggggggggggggggactaatgacgtaggaaaaataaaaacttggtggcttttttcttataaacggttatttccttcatatggtttgcagataattatattccataatgtgtcttgcagtgttcgaaagctgaccttttcagttactttgatttcctcattctcatagatattggaagtcgaccctgttcttcagccaaaaaaagccgatatgacgtagccctagttgtacctggattaccgggattgcggtaaacggcagccaagtccaagtctctctcccttagtccttattacctgggaaacttgaaatatttatgaactacttgtattttatgaactatttgcaggctaggcaagctaggcatccgcaggacccaatgggcatatctatggggtatttgggtgtctgccctaatagaatcacattcaaaaagcgactcgtggaacatccaaatcaaaggagaagctcttgcggtctagaccagagaattcaaaccccttatcccccttgatcagcctctgatttatggggaatggggtatcatacatagaggtcggatgcattgtcacgccttgttgcagatgcctaaccctgggaacgagaagatcgacccgccgacgtcaacggggctcctgtggcgccaaatcggctcgatgggggaaggattagtgcatggacggtcaagctccccttttccggaggatattctattcacgaaataactaatctggggtctacaatactttaatttgatatatattgggagtaatattgcagatttggcaattctcagatggtcagctgagattctcctgtcctatttagaataatacacacattccgttcttcagggctggctcccgtatctgcagtctagactctctaactactatatgcagttaccccgtgcggcgctataactagccggtttcatatatgttctagttaactataaatcctgaaatctctgttcttccaccgtggtagaattttacagtagctattattaggccaaacccatttgaagttgagatttagtgaaatgtacttcccgacagtcgagtaatgtccagtgtgacctaagttcaagtgcatgcgagtctccaggactacaatcagtgcttatgaaaatataacaacccatataaaaagccacaacgccatgcaatcatatccttatttaccagagagttccgggaattccgactccaagtccaagtccacggactgtacaggctctcggttatcgctgccgacatcggaggactcatccaaaccactccgaggattcaactccctttgataaatcggctgttcgatatccttcaaacccgaccccgtggggtctctccgaatgaggaagccctgcacgcgcgcatcatttgaattcatctgtttgacggtgctgtctctacggtcccgtaggacgcgcgccgacttctcgttaacctcacgtagtcgatcagtgtagccagaattcatctggctgatccaggatgcttgaagggcgcccgcaaacagcaccaagaggattacaagccgagagaaggtgcgctggtcgacaacatgctgctgcggcccttggtggcggttatgccagtcctcccaatcttcccatgtggcattcgcgtagatattcgggccatgggagttgcggtccattgtagtatccagtcccgcgtggatccagccagtgccatttcgatcataggccgctcgtttgatcggatcagaaaggagatcatgtgcatcaaccacaattcggtagcgctgcaatcggctttcagcggttaattgattgaagagaggatggtcatggagaggtcggtcggggtggtagatcttaacgaggtcatagtaatttcttttcgaatacttcccggtgcggggtaaattcaagacatcatagggggtgaaagatggattgctcggccatgagtagttctggtgtgggaactctgttgcggtggcatagttcctgcttttgtatggtgcctgcagtctatagcttggagagattctggtcttgaaacgaggaagcggtaagaccgtagtcgagttcaaaagtcgcaggctttcgccaagaaaaggattgatcgtcttgaacattttcacatggtgtcactttaatgttcacgtcgaaatctccgttgcgctgatgtcgtaagttatcgtgagggtcaagtggagtggcggcttcggggctggtcacgtgtatgtagtttttggagcttaaccaaagatctccaactttttgatctacgcttgtctttttctacagtcacattgcaacagcaacaatggccgagtccaacgacgaccgcgtcgaacgctgccggcgctccacgaactcaccctcggatcagacccatgaacgccggcgacgagatgcgccccgagacgactattcgcgttcaagacgacgtggtgaagaccgccggaactctcgtcaggacagccctcgacggagatcatcccgtagtccatctgaaaggaccagcgtccgaagtgatcgtgctcgtgatcggcctcgtcgcgagcgcagagagcgatcaacaagctcagctggcgaagaccgccgcagacacagacaccgcagccatcgataccgtgacacccgccacgaagacgaaggacgagtgtctcgaaggcatcgagatgcgcgatcacgctctcgctcaccgcgaaaatcacgcagcccctcaccgcgagcattggaacgacgcggccccctcccctcacagtccgacgcattcaccgacgtggcaaacccttcagatgcaccagcgccagaaaaacaaaagccaaacttcaacgctactgggaggctcgcagccgaaagcaatacaattgtccagggtggtacgaaaatagtcttgaaataccatgagcctccagaggcgcgcaagccgcccgccaaggaagcctggcgcatgtatgtgttcaaaggacaagacttgctagaaacggttgaattgagtgaacgcagttgctggctggtcggtcgcgagcgactggtggtagacttcccactcgaccatcccagctgctcgaagcagcatgcggtgctacaattccgatttgttgaaaagcgcaatgaatacggtgatcgcatcggcaaggtcaagccttatcttattgatcttgagagttcgaatggatcgagcgttaatggagagaccatccctggtggtcgctacgtggaagtcatggacaaggacgtaattcgcttcggcctgagctcgcgcgaatacgtcctcatgctgcctcccagttgagtggagctttcagtttggtttaaagcattaaagcgctacgggtacaacatgttcgatgaacggaatatgacaataatattacaagtcggatcataattgctgcaagcttaacctagtttttgcgggcagacaaggtcaaaatcttaatcaatgcggcacttggcctccttcactacccttccatctggcccatcgcctactttctcagtgcttcttctgccttgctcttgcccttgtctgcatactgggccgcctcgcccttcacctcttctcccttttcctttgcttgcttagccccgccgctaacagcatccttaagcttgtgggcggctttctctgtgggcaaattcatgttagcatcagtctctgcacattgaatcaaagtcatatagatcaatgagatcacattgaagacataccacccgtgttgatgcccttgactgctgcatcagaaacagtccggtcggctttcttcaatgtctcctttgtcgcatcaacaggtcccttgttgcatggtgccgtagctgagatggagcgaatggcctggaagccaggtgcggtctgtaccgccacccgggttctgaggagaggagcgaatcgtgctgcagacatgtttgtagtgtgatggaagtttccgataacgtgggaaattggaataattgatgaaatctttattgattttcccccggatcagtacaaagtaacttgtttaaataggtttggagctttgaaatgtacttgatttctacttggtcgcccccagctgttagttgggttggagacgtcatgagtatgtagcccagctcttacgtcgattgacagtcagttggtcctccaaacaggttatgtattccgtttgattcggtgactggatttcatacctgcataaatccggttttgagtatgtcatttttgtcattcgttgatcgacgccgttgaatgtgggggacagcgacccacatgtagagaacctcaattactaccggggaacaagaatttgctaaggatcacaacgattgaacaatatatctataactagtgttgcaactctcctattctaaatcacggaaaaatatgttggcgatgctcatcatcgtcacccgggaaacctggacggtgtatccaagagacggatatctgcatgtaggtcatagctagcttttaacagaacgcagactaatatcgaacttgagctcagaatatactccgtgtggctacagtacctgactcgaaaaagcatatatatcacccgtagacaagtatatagatcctgagatactccgaaatatataaccgacccaagctgaacttcttccgcgtcccggaaccaaggtatcctggttatatttcgccacacctagttcaagtctatacgcgataatatataatcgaaaactacggccgaagctcaatgatgggtgttagatgaaacttgaatctatctatatcttgcatttctttcagaggatggcccacttttaccgttaacgttgagcgctcgataaacaggtcttgtcacgcagagtatgcctggtaattatttaggactatgcttccatatgccaggatctctgttgggatattatacgattgtctcaagatccagcgcaaaccaaagttggtcaagactcggagtctcgtgatactgaggagcatagtatagacgcgtctctgtcctcatatatatcacagttgaattaaagaaaaccccattggggtagggtcttacgatatggaccacttaataagagcctttattggcgattagtctcattcaatgagccaagctaacagttgccaacatcaaaagggcaagagagttaacttgctttgtcccacccgacctgatatgcaagtatacaccgtagtgcgaccctgggatccaaactgtcggcaaagcatcaaatcaattacaagccatggaagatatcgaattgatatacagatgcataaatatagatttattcaatatcaagggcataatatgaaagcttactggttcttctggaaacaaatctcgggaatagatatatctataggcatatacaaatcaattcgcactatacgaatatattcaaggtggaaacttgcagataagttgcagatagcagagacacgttagatatagcctatgaatttgatagtcagagagttctatagtatgatagagaatatcaaacacgaactatgagcagatgtaaacaaagttccaaccttggaagtacccaatcgggggaaaaccaactggaaggtttctgtcgatgctcttcacctaaagttttatcttctccctctaccctttccatccactctttctcttgacacaccatcaaaacaacaaagatatttcttttttgccttctttttctgtactctggaccaacttgatccatttctggttgtacttcattacaaagtcactcactacaaatggtgtccgcagccaaccccagtcgcgttgacccctccgagaaagaggaggagaaagcattgaccaacgatgtttcccttaagcaggaaagcgttgcgatcaatgccgagcaagcagacgagcccaccgcgcgtgaagtgaccgagcgtccaactggtcccaaattggctttgattacactggcattgtgtctaggagtattccgagttgctcttggtacatttacactctcagtgcagggcatgactgacgcatattatcttgccctatagacaacagcatcatcgccacagcaatcccaaagatcacaggccaattccacagtcttaatgatgttggatggtatggaagtggttcgttaaagcacgaggcaacctagctcatcggtgtggactgatctttttctctcttttccagcttaccttctcaccacggcgtcactccagctacttttcggaaagttctacacttttttcaatgtcaaatggacctaccttgctgccattggcattttcgagctgggcagtctgatctgcggcgtggccaacagcagtctgacgcttatcatgggccgtgctgttgctggtattggatctgcaggcattttctccggctcgctcatcatggtggctcactcggtggcacttgagaagcgcccgttatacaatggctgtatcggtagcatgttcggcatttcatccgtcgctgggcctctgctcggtggggtattcactgataaagtgacatggcgctggtgcttttacatcaatctccctatcggagctgtcactgttttggtgattgcaatctttttctctgcgcccatccacaatgttaaacaaactacatgggtagagcgcattaagaagtttgacccaatgggtacagctcttttcctccctgccattgtctgcttgttgctagctctgcagtggggtggtagtatctatgcttggaatagctggcgtatcattgtgctgttttgctttttcgctgttctcattctcctgtttgtatttgtccagcacacacagcaagacaatgctacagtaccgccacgcattttcttccgccgcactatttggaccgctgccctgtacagtttcagtctcggcgctgcgttcctctcctctgtctacttcttacctatctggttccaagccgtgaaaaatgctagccctgtcagctcaggtatcatgaatcttcccatgctgatctctgttgtggtcgcctccattttatcaggaatcattatcaccttcgtcggttactacacgccatttatgattgccggtacagttcttctcgctatcggctatggtctcatgagcatgttccacacagacacatccaaagctgtctggatcggctatcagataattgcgggcgccggtgccggtttgggtatgcagcaatctatgatcgctgttcaggttgtccttgatattcctgatatacccactggaacagctatcatcgtgttcgcccagactcttggaggtgctctctttgtttctattggaaacaacgttttcagaaacaagctcattgagtatcttgccaagtacacccccaacttgaacccagcttcgattctcaataccggcgctactggcttgcagagtgtggttagcaaggctgacctacctggagtcctccttgcttacaataacgcaattacccagacattcatggtcggtgcagctgtggcggccgccagcatgatcggcgctttgggtgtggagtggaagagcgtgaagggaaagaatcttgctccgggagccgcataattttctgacaacttcttccagcttttttatgttagcgctttgaatttcttttaacggcatataacatatgtaactcgttttattgagatatcaaatgccaattctccttatcagccagtgataaccctaaactgccacccgtggacctcggggacctgcgcagctaacccaagacgtcctagcgtcctgttaaccccagataagcagcggagaacatcgttgacttcacaatatcttatgattctaggaatactgggggacaatctactccatgaggatgccgaccaagcgacggattttgtcgtgccagccgtgtcggcgcttgaagacacgatgcgaggttcttccaggttcgagacaatgtgctcggtgcatctctctaaggtcggcggccgaatataattcatcaacaactgttggggattaatctgacaccaaataggctcgaatgctctcttccgtccacatctgccatcactagcccagattcagggtctattgggagatcagataggaattccgcccagcctattgcatgccattgcgcagcccggtatttctaattacacttgtatagaccgaggctctaattactaactgaaaggtaccagtcttgatgccatcgaaacctcactctctgagatgaaagaattactgaaatcccaccttctcggcaatgaccggtcaatggcacgacatcctgccaatgagatgcgggaaacgagcagtaatctaaacccgagaaaagatatcaacgatagcaaagccactatgcacgtgccatcagaggcagatatatcggcaaccaccgacatccagccagcaccaatcacagtggtccgccatgttggaagtctaatcaccgagcccgtaacaaccggggaaaacgactccctccgaggaaatatgaccgaaatgggcttggactcggacagcttctccagtgttttccagcacggcttcgagcagatagcatcctggtacccatttccgaatgaaaccctgacggacctcaaacagaaccatcctctgctctttgccatgtgccttctagcaggtatccgcgcaacggctggcctaaatcgcacaaacttgcacataacccttcatacattggtcaagacccacttgggcatgaaaactctagatacgcccattgatctctccaccatacatgctatgcttatcttcagtgcctggagcttcgggcctctcgtgccaggtggtagatatattgatagctggctgatgagcagtacgactatcacccactgcatgctcagctttcctctatccgagcttgtgtctctcgtgggtttgtacgatgaaacaaatcggaacatgtgcaggatgtggattcaggcctcactagtgcacctgaagtacgtactctgcaaatttacaatggtaagcccttctaaaatggcaacagagctgactagggttcaagatatgcaattggcaccggtcggccatcagtggtcccatgcgagcgtcttcaccagtggacggagatcgtcaaataccccggatttgaaacattcgaccacatcattgccgcagagctcaagctctacatccacctgtacgaagcgatttatcacacggtcagttcagtgaccgaggcgtgggacatggtcaacagatggggccgcaaatatctcggaggtgagcaggtcaagttaagcgtgatgcggctatattcatattctgacattcaaaacacagacggcagcaatatactaagatgggcacactcttgcgtatctctcattttatctcgatgggagctagcaaagcagaatcagtccacatctcccgactcgctgatgcgcactgagcgtattaacgagctgaccgaaacggtcatccgtcatgctcagctggtactgagagagattctggtcctctgcacctccgacaccgcgtttgttagaccgacatacgactatctgcttaccgcatatgcgggcgtcactctagcagagtactgctcgagtatatcggacgtgcacgcaacatatacgttgatggaagatgtgcggacgcaggctagaattcccaagagcattgagggggtatttagttgggcaacgaatgtcgtgcagaagaaggcgaaggatcttttggattcgaaagtggcagtaattcccgatgacaccttttattcgtaccccggctcggtcgctgactgggcgccgttccggtttattgactcgatgcctgcttctgaatgggacgggatgaatggctctatgcaacacttttgaactttatagaagcgacttgtctattatttgacggtgaattaaattgaaatacacctttctctgagtaaatcatttcttcaagcagaaatgggctttccatgtgcgagttcaattcggtttcgatgccactagacgtacaagttaggcacatccagtacgggacgatatggatgcggatgagacgtacttttccgcaagagataggctcataaagcgcaggatgagtctcatcaatacacgagggcacaaccttacaaaccgtatccggattgaagcccaggaagaaaggcatcgagtacctagaagtaggctggcgattatagaccctatgcactgtagacttgaacctattattagaaagacgctgcaggaagtcgccaatattaaccacgagcgtgcccggtataggcctcgcatcgagccactcatcactagcagacaagacctgcaaaccgccagacatatcctgccacagaagagtgacacattggatatcggtatgcgagccgatgccgacatcaacattcgcattgttctcctcgagtgtattggctggtgcaggggggtagtgtatgtaaagcccgtctgcgccggggctcgtggtcaccgcatcgaagtagtcttctggcatgtctagagcgagagcgaagatacggattatcttgcgcgcgagcatgaggcgacgctggtagaattcaattgttgtttcgtggaaccccgggagatggctggttgtatcccatgcgaaggcatcctcgatagacagcgcgtccgggtcagagacggttggatcgttcttaggattgtagcgcagagagaatgactctttgtgatctgcggatgtcctttgtcagtcattggccataactatgacgaagatctctcgggtggggctgatagtgtttaccccttgtttcggttttgttaatttgggtagtccccaacccatgccatccatctgtgttgttttggatcttgcttgatgctagctgtttcttttcgatcggctggtcgaagaaagcttttgcttgggaaagggcattctcaataagctcttcggagatgccgtgatttttgatatagaagaaccccgtgctttcggccgctaccctgaccttggacgcgatggtcttcctcgcttccaaatccttgtcgatactagcgagatctatgataggaatctcatcctcagttggtgggcgcggaggagcagttgacactcggcggaattcggggccgctgagggtcaggagttcgacttgggtgtactcgagcagggttgtcatggttagtgcgacatatggccattaccgactcgacgatgctggtgcatttatccatgcctgttcttgtcttctccccgcactatcccctccagggtccagaggtcgaatccaccgataaccgtcggagaaacagacggcaatcgtcggactatcttggcgcacatgcctgtgtggttggttggaagataagccgagataggctcgcacttgggttacttggcttttgtttctgagatagcatcgccaaggacggagttgcttctctgcttgttcatgggtgttttgtaggttgccagtggacaagtgcggatgactccttatcagtccattggtcactccgaatggctaaataaccctaagaaagcacgatatatcctgcacgtactcctcagttctcatctcctcccccctttcttcaagtttcagagttcgccagtaaggtcagcactcaaagtcaaccatctttactttgacccttttctccactctatctctaccccaccaacccaataacaacctcaataatgtccaaactatcgcgactccatgagctcttactagtgaaaagaacccagcgggatggcatcgagcgccccgttgatatgctggataatgactctatccgaccgacttcagtaaaggatcgaacatggtcccaactcacctatatcatgttctggttctcggcgactgcgaacgtcagcaatctgtacacagcgtccacgggaatggccatgggattgaccatgtgggaagcgatcggatgctcgttcggtggtcagatcctcgccggtgccttgatggctgtgaacggccgtgctggcgccatgtaccgcattccgttccccgttctatgtcgctccagctttgggcattggggagcactgtggccgactttcaatcgggcggtcatgtcaattgtgtggaacggtgtcaataccgttcaaggaggacaatgtttatagtgagtctttttttttcttagtctcgttctttccctggtgagggaagcactgaccgtgtggttgttgactttcgtttctagtgtctttctccatgcgattttcccttctattgaaaacatcccggataagatgggatccaagtcggctttgacttcagcacaaatgatgtgtttcttcatctattggtacagtggctagtatctcaatgcttgatctactgctaactagtctccacaggcttgtcaattgcgcattcttagtggtgcctgtaccaagaatgaaatccctggtctacatcaaagtcgtcgtttacttcggcgcagcatttgctatgctgggatggactgtgtctctcgccggtggttctttgaagacaatcaatgcgccctcggagataaagggcacggaaaaaagctatctcatttttaagttcctcttcttgggactcgcaagttgtggaactttcatctccaatgcgtccgatctccagcgatacgctacaaagcccaacgacgtcctcatcggccagattatcagctttccactgtcgaacttcctagttgccattctaggtaaccttatcgcgtcagctagcaaagctatctttggaaaggtttgtactatcaaaagccttgtttagaactaaggactgatgaaattctctagctcatctggaacccgctgcagttcttggacaaattgatggaaggagagcgatacacctctggcaaccgcacggcctgtgcttttatttctctggcattcgtgtattcgactgtcttctctgccatttttgagaactctatcccgtaagtatcaccttctcccacatttctatgccatatactaacaaccttcagtgcgggtaacgatattgcagccctactaccaaaatacatttcaataaaacgaggattcttcatctgcgccggtaagaaaagaaccaaagactcaaaaaattccattgcctcgacccaaaactaacaaccaaacctactagtcctctcctacgcaatctgcccctggtatctcctcgcatcagcctcaattttcatcacattcctctcctcctaccaaatctttctctcagcaatcaccggcattctcatctgcgactactacctaatccgccgagggctactcaacattcccgccctatacatctcaagcccaagtccgtaccgatacttccacggattcaacccgcgagcattcttgacctacgttattgccattgcgccaaacttctacgggttccttttccagatgggcgtcaaggcgcctctaggtatcaagcgattctactatatcgcttaccctaccggtctcataatcgcttttgttgtttattacctgtcgtgtctggccttccccccgcctgatatgaagcaggcgtctggctggatggagcctaaggacttcgtggaggatcatgatgcttctggaagtgatgagtctactattgatgccgttgaccctgacttcgcggagaagggggctgttgcggttgctagaccagctggcgaaaagggttcgttctgatgagatatgtctcgctaggacttggggatgtgcatgttgcagcgggaagcatgattaatgatttggtgccatatttacttaatgtctacagtcacagcccatgtgcgcagtttgttcatcttatgatcaactgaaatgtattctctttgctactactgtttaggggacaaaacccgggctcaatttggctataaactatgcacagctaattatgcgtataattctactgatctagcaggtttatgaacgccaagaccataatttatgcaaacacatctcccatctgatgtagtcgaactacaatcttgatacaaagtatcgaagatagtaaatcaacccttccaatgaatctcctctaaattctatcttctaaactccgattgacgtcacgttcttaggtattacccaaacctcgaactaaaagaaactgagaaatgctaaggccacgcaaaaaaaagacagatgcaagattagcaagtataacagacaatgcacgcaacaaaataacaacatggtatgccaacaaaagaataaagacgaataaggataaaaaaagccaaaaccaaagcaaaccaaaatcaaacaccaatactaaaatacataaccattatgagaaccgcacatccaaaccagcatagtcaggttgcacaggggagcttccactacgcgcacgagtcccgtatgcctccagtcgcgaagccggcgcatagatttgtccctcatgctgaatcaaaggacccgacaagttgggatggtacggctgatactggtggggccgcggatgcaacagccgagccgattcatggagtcggagtcgtgcatcttgtacatcaacacggtgctcgccaaaatgcaaaaactgcactggctcgatctcctggttccagcccgagtcaggatgctccagtcgctcttccatggagccgaggtgtccgtgcgatgacgcgggcgggctgagggagatgggatctggctggagagcagcattgcctgccagaggtaattcggtccagctagtcccggtcaacatttgctgttgattttgcatgctcaatggtggatttaggatcatctcggcctgttggaaactcgggggatatcgcacgggttctgtggcccacgattgataagagtaggcggaagagtcacgcgacatcggctcgggaactgagcgctctggggctgaccccacgtgtactttggcattatatgatggcaaagctctgggcataattgcggatggatgagcaatggaagaaagagcccctggggaatttattgagcctggtgttaattgagacgattttctgcggtttggaagagaaacggagttgttctcatcgtatgggggcggcggtggatatggaaagaggaatggcacgcttgcagatagatttcgtggcacctccagatgtggcactgagccacgccgagagggagcctgggatccaggcgtggtatgtaaatctgccccgtgatggtgactgaacttattgaactcaggctcactgtaggttgaccgactcaggggctcggtgatcaaatcttcagacacatcatggtatagcggagatgtaaaggcgtagcccgcttggctgtcgagcgagtcagtggaatgttttatctgcaagtcatcattcaaataggctgaagcctgcgaaatgggaactgatgacgggcgcttcatcgtagactttacttctaacctccgtcgagttgccacattcgcatacgttggcatattctctttgttggatggtggagaggtgattgcaggctgcggaacgtcagcggacgcttgggaattgctagaccgacgcactgcagcaagtgcttgttcagcctccgaagctgacatcaaagtgccccccgtttcggcagatgttgtgcggcttgatgatccctttccttggatggaggacagtctgaccagtggggtatttaacttggtatctacaaagcgacgagggcctttgctgcgcctctttgtttgagtatcttgatttgacctttgctttgagtgtcgattgaccacatgccactccgctaagccggctgtttgtggaggactgaatgagggaggtgtcttgttaggtttctccgtggcttggctcgtttgcgacatggctgtcttaacttccccgtctgtttcataaccttcttcagattcgtatccagcttgcctgaagatatgtggagggaaaagctctaatctgaactggggaggtggtgtagctatatgctcaggcgttcccgctcgagatgattcaagatcactccagttgaaggtagagcggcgcgatgggccttcgtcggatgaatcgcggagggatgatgacgagctgcttgacctgtcgaaaaccgacttttgattccgtgtagagtattgcgaggagcttggagacacattatctatctctttgcttattatcttcatcaatcgtcgcaaggtctctcgtgtttcacgaacgatcagtggatggagattgatggctgctttctttggaaagagctcaagcagtcgtgaagcgtgagtttcgtactctcggtagtcccggacaaggccacagtcttcgtaatgagccattcgtcccatagcggcatcgtaggacgtaatgagaaaacgagtggcaacaatcagccaagtatcgaaaaaaccagggtcattcttgctcatgatgcctttgttctcctcgtccttgattcggagctcatcacgacagaacccctgcacgacactatggatcttgactacatcaaccacagatccaccccggtatatggagaaaaatccttcttgactgctctctgtcagggaatctgagagttcggaaacaagcttcacgtccttaggatcgctatcagagtgacgcaaagacgatctgtgctgaaagagatcggcatctgaaatccgttcaatcaaaccatagtgaatgagggttccaagagtagtatcgagatcaggatcttctccggattgggcgctggtctggatctctaagttcacggcggccatagccgctccaccgaggttcagaaggcccactggcacctggtggccaagaaacgagagaagattaatcaagtgcagcgcctgcttttgctgcaaccgaaacaagtcgttcatgatactcaagaaaggttctgcaagcttcttgtctgtcacctgagatctgacatgatacttttcaatcggtttacccgttgcattgagacggtgcccaattgcatgaattgccagaggtagacattcgtagttctcaactatctgggtagccttggccatttgctcgggtgtcggtcgtgtaattccaagatccttgaacagaagcttgcaagcgtcacccacttgcaaccgtgagatcatcaggcaatatggctcgtacagtcgtcgctttttgcgcagcgttttatcgaccgaggtgtatatgatactgcactgtttgctccagggcagaacctctctgaacttactgatatcgtcatcgcgctcgaaggtgacgccgtcgaagatgaggagccaatctttgcgtgtctgcagccagaggcggactgcattcacgtacttttcagtctcgtggtactcggggttcacggtcaccttctgctcaattagcgtggctgcttgtgcaatctcccaaaaacacttgtacgtcgattcacgggacttggcgtcaatccaaaatatgccacctgggtagcagtcacgttgagtaaaaacgtactgccgcgctagatgtgtctttccagagcctggaacgccggagattagtacggccattgtcttttccggacgcgccttggctttgaatagccggctgtgcagcacttcaagttctttcttcataccaaaaaaagtagagttaggatgaaagcctggaggtgtcacgaataggggcgtttctttggcgcagagttggaaaattccactgttccccagatcagatactggggaattccggccttctgtcgcagggccacgcggtagagataatatggattgttctaggatgaagtcagccagggtgtctctaaaagttgtgatgattctcatattgagaagatcggagatctgctagttgaggacatgagatgggagccttcctagtgacaaaaccaataaactaagtccaagaagggagagcacacagtgagttgtctgagaaagagtagagtggatttccaaatgtatctggccccttggctcggtagtgaatgggcaagtcatagagaagtaataggacaaacgtgagcaaactgagctcgaagtaaaaacaaataaaggcaaaggcaaaggcaaaatcaaaggcaaacgtggctcgctagaaatcttcatcgaataggaggctcctcaatctcatagtccctcaacgtaacggatacttccggtgcagggagaaggtatgaagccctaccggtttcgtttaaattaggcatgcttcgatttgccgtgtcatccacttttgctgtaatagtcagtattcaaaaacagacaaatcaaagaggtacactttttgagaaggacttaccgtcatagatctccctagccttggccttcttttcccggatgcgagatttcttctcttccgtccagcgctctgtaatcacagcaggggcctgacgtgagtatcgtagaatggcctctgccacaacttcataaccagccgcattgtcatcatcaaacttgcacatatggctgtggtcagcctcgatacccgcccgctcaacaccctccatgtacggcgcagctgagtgctcgtccacgatcacttcgcgggtaccatgtacatcagtggagcgtgtctcgtggaagaagtagatgtgaaatcggcctatgatatcagcgaaaaggctgttgatgtgctgcagtgtttcgttgttggctcgcagagctttgacaagctgcggagatgtctctatgaacttcttaggaagcacagcattgcaaatgttttgcaacaaaagaccccatttcgcaatatcggatccattgtggggtgtgccgagaaaaaggatgccaaaagtggaaacatagaccgaacgtagatgctctgtcttctcactcgagagactacgggagtaaatcagggcgcgcttcacaatcaacccccccagcgagtggcagatgaagattatcggacggttggagcagtctcgcagctagacaagaaaataatgtcagttctggagactccatatcagtggcaaggaagaaaaaggtggagatgtcaacctacatttcgattagcagcgagactggaagcaagagtctcagcatggctaacgactgaatcacgcgaagttccatctgtaaaggcagtgacgttggcattgtaaccgtaagtaagaattcggggacacagcgaggcaagcacgtctgggagaaggtcggtaggccagaagcaaccggtggtttggctggtccaagtgtcatgaggatggccgttgaggccgtgaacaaagacaatatcgattgtaggatggtcacgcggggtgtagatctgcgtcaagccaaagaccttgatggcctctggatcggcgatacgaggcttagacatggcaatggatgagacaatagcagagtcaaggtgctattgccgtaacatatgaagatgaaaagaaggggaaggagtgaagaatcagttcggactttggcttttataaacgtgatgcgggtgactggggtgagcgtgactgagggtaactggggtgatgtgcctcctctgacccaggtcacccggaccctttcagtcgatccatggggtttcggcatttatggattccgggtgacgggccgtacattattctctaccttttttgtgatgtcttgggtcttgcctattggtagttcaacccggggtttcttgcacagccctgtcagatcgggtaatctgccaggtaccgtgccactcagacctcgaggtacttttattcatagatattgcattttgcatcttgcatcattgctgagtatgccttgtttggggtatgctgccttaaagtgttcagtttaggatctcgttaccctgtttatattgtagcctattaatgactagggtgagaactatagagtatagacgagccctatagatattcaggcagaagtctaaatagaacaaccacggaaataaaagatatcagatccgatatacaagacaaccatcgtgaactttgactgattatgtaggatagtactaacaatgtagaatagtaacaatgtaggatagcactaacagtgtaggacagcgctaataatgcaggacagcgctaatagtgtaggaaagcactaacaacgatgatctacgagacatagtagttccagtgcgccaccgactcatccctccggttcccacgcctctaaaccactggaagtcgagtaacaatgccaattttcttttctgtgaaatgtacagcctattgttcccaggcgcagttgcaaagtataggtagttccgcatggcctcaccagatagcctgacagctcctggttcttcagccttgattatggccgtttcagaaaaccaaggagtgatctgcaatccgttttcatctataatttgaagttcaatcaaggccatgtcgcattgcatcgacccgaaagcaagctcgacagaggctcctccaaggaacccattatagcccagctgatcacattgtaacgcactcaagtcggtatcaaagagtgtctgcacattactaccggtatcgttggcgatagggacatcgatagttaggtttggattgccgccaaacaacgccgggagtctaacccttgcaaaaagctaataaatcagctaaagtagatattagtaaatatatagtatacctgatgcatagcattcccgggataaaacccataagaggtcgactgcgccatctgcactagtgccggctaggtattatagatcaatgatcaatcctaggccactatagtaccttattgttttgaggtagttacctggggaggactctgctgcatcaactgatggaaaattccctagagtggtcaggaattattaaaatgtaacgaaggtagaaggtagagactaacctcggcccatacagcagaatgtaccataattggcggaaggtcattaaggcgaggcggcggatccatgatctgccccttgcagatccagatcgtctgctgagtcctgaccgggaaagacgagcggcccgagttccccagtctcatacattcggatgagtccttcaatattggttctctggcgttgtattttgggggtcggatcttccaggaatttcttgagctgctcaatccgttgctcaggcttgatgactaggggattcggacagaatgggcgtggattgaatgggcgtgggctggcatcctcttgttgcgccattttgaagacttgataaccgaggagttaagtaattctattcttggggaatagactgaagagggtatcaaaaagtgtagagggaaagatagagttaagagctggcccctcttttgttacataaacggcacgtgataactaactaactaactgagctttttccgtaacaccaacgcacgtacgtacgaccctgtgatttatacttgcttcgcttcgctccgcaatcaccatttcctacttgcagtcatcaaaatctttctttcgcctcacatgttacttctatcgcattgcccgcatgatcagaatcatccctggatgtccacatgatgtcttggtacgtacataccactcacctcacgtagtctactcggtctatttagtctatttgaatccgttttacttcttccaagctcgcaatagaaagaatctaaacatgaaatttcatagaattacaggacctgtcattttgataatatagtttacctagttaagtagaccatcttgttctacatatatcacccactcatccacacagaccattacctcccacggaacgccggcttccgcttctcaacaaaggcgcgcagcgcttcataccgatcatcagtctcaatgactccctcataggccgcattctccgaccgctcacccagaccatgggcctcgacagcctgcatcgccatcttgatagcaatagggccaccctcacagatatccagtgcgagcttgatactctccagcaggacgcgttcacgcgcaacgccatcctgtgtctcctcttcaggaagcacctccacgagccggtcacagagcccaatgaagtaagcctcaggtccggtcacccggcggccggtgatgatcaagtcccgggcgcggttcacaccaatgatcggaggcagtcggtatgtaccgccggcgccggggataatagcgagacgtgtttcgggaagaccaacgacgctagaggacgagaaaacgcgcaggtgcgtgcacagcgcgagctcgaggccgccgccgagagccacggacgagacggcggagatggtggggatttcgagggaagcaaggcttttgaatgtggagcggagtttgaggaggaagtcttcggtactgaatcgtcgcgttggatagttagctgcatatgttcgcgtaaattgaaggcttcaagcccgggtacaccgggcaccgggcaccagggcaccggggaaaccgggtatagggttgtttctcactcggccatgctcatgttggcgcgttccttcaggtctgcacccgcacagaatgctgcgtctacgttactcgctataaccaacgcccgggttggcccgttgcctttttcggcggcgatggcttccacatgcttcgcgagcgtgtcgagtaactcggtcgagatcgcgttgcgagcttggggcctgttcagctgcagcacgcgcacatgccctgagcctggggccgggatctggtgggtcttgataatgtctccttctgtgcttgtgctgtaacgagagacgaagacccgggcaggcaccgcggtcgcccggaggtgggcgagaggtgcggagaggcggacgaggcgcgatgacatgatgcttgtcattgtgcaattggcaattcaaaagatcgagggggtttacaccgcgatattaaaatgatgacagaagattactgcgctaaaaggttctcgggtggaagatgttctcggagctcgggtgtggggaaagctttgaatccgacgattaccgaaagcaacatgaacagaataatatgggggggtatcatgtacattgacaaaagtcctataaaactacaatattatatacacatagtcactggcagtattctgtaacctccgcatcactcggccagtcccagcctgtccggctgataaggtcgcatgcctccatgatcaggtccgatggtatccgcgtgtcgattcgttgctgtcgtctttccaaaaacaccctgatcgccacaagggttcgacgcatcattttgtgtccatttgcatgttcatctgcagcttctttcagtagatcagctgactgactcatccagtgcagcagatgcaacaacccttcgtcatctcctacggaccccaaagcccgaacaaaagcatgtagcgtggcaggtgatggtatttgcagcatcgagggaactttgagctgtgtttcggaaacgatatctgctgcaaagatgcttcgctccgcatgctccgaggttttggaggctgggagaacgagatgatcaaactgatgcttcaaaacctgcagcgcatgttgcatcaaagcgtcaatttcgtcatcaccctcgtttttagccttgagacgacggatacgagcattatggatcagcataaagctttgttcggcagtgccagggtgtctgagggcagcgtcaatggctttcgtaaatgccacacataaaatgcggaatccttcctcgccaagttcgacatcgcgctgtcgcatccagctcaatgctctgagagcctggtgccatcccagtatgcgctgaagacttcggcttcttgggccataatacccagtgaggcgctcgcgggtcagagcagataaaatgtgagtccaggcaggggtgtaaggagcacgtcgcaatttagtcaattggatcgcgtgccataaagcccttggatgatgccggtttcctggatgttccttggagtatgcgataaggtctattttcgcaccagtcgaagagtcggccgctatcaatgccgggaaacggtcggttgtgagaatatttcgattaccgctatccagactggatatatctgaatgtgtgcataggaacttgatgaacgatgcaaacaccaagtccggcaattcatgaaaagcttcaaggtccaaactgtggtatttgcggggcttggcccgcacgatggagagcacctctatatgagcatctgtcaggccactgcattggagataatacaatccagaccgcagagaagtagccgactgaagtagtaggctgaggaatctcccagagggccgaagcccttgtgcacgcatctggtcaagtaactcatccatggtaggcggttctgtgggcacatagataatgtcacgagcggaagccggttcggcgtgaacttcacggccatcccctggaagagcatgactcatttggtcaaaatcgcgttccatggcgtgtcgtcgatatattaacttttcagccatggcagcgtagatagcaccctttgggggtagcccatgatcctgataggagagaaaacacgcccaggcctcacggacagtcctcgtagaccgaatgcgagcaacccacatttcgtgatgattggacttagatccatgtctgtccggtaaagcttgcgggcgacgcatcatagctctcgtctgcactgtcgggctgtgatcggtatcccaaccggccaaaatcgaggatatgtcctcccacagacgatgggaatagccagcatctttcatttgtgaaagtacctgcatcgcacggctgaacatcccctcattcccgcgctgagaatcaattcctagtttctcttccttccaaggaggccatgacggagctttaagttcagcagactggcgctcttcggatgttttcttatgggccagttggactgcaacaactgctcgatatccctgtcttgtgacgggaaggacgggcttatgggttgccatagctcgaagaagctcaaattgcgcttgctgttgaatagatgtagatcggtaaggggcaatgttagccggtatagaaagtaaccagagacattcattaaatttgacggttttgacgcgatcatcatttcgcgtcaccaaagctgacctctcggcgttatcagcccttggggctgagaggaagcgagcgaatgcacgtgaaatagtgagaagtgattgtggccacactcgccgagcatgacggattaaacgaacgaccaaaatcatacaggtgccagaatcgatttgagggcggaagacctcagggggtagctcaagatcatgttcggcaaccccagaaggagcttcggcaatggggaaggtatgtccgctcatcagatgtaaagagtggattaaaagcaaacggaacgtgtgagcatcgagattttgctgtctcaaaagatggaggggaatgaaaggtggaatgtttgggctagcagcgccagatttggctctgtccgtttcgaacaaaaacagccgtaccattgcctcgtgggcattctggctcttcatgatccaggcccaagcagtcacatcggcggcatcgtagccacgcgatgataaataatcatggcttgtgcttctgaataccttctgcagagcgatattcaaatctttctccgtacttttatccgacacagacgaaagcaacgggtccacctctcgtatatactccccaagaataaccggcagtgacggcttttttggtcgaccaactgtcctcaactcgttctgtgtttggagagaatatttggaaagagcccgatcaagcccagctgactggccgtcatatccaagggggtggccagtgtttcgcaaagctttcgagaggtattcggcgggcttcggtttcactctgatgctggcggtcttctcaagccttttctctctgagcgagctattcaccgattcttggagcaatgctgcgcattgttcgtcaagtgatgaatctgatcgctctttattgaagagattatccaaatgtgagtgttgagtgtcgattgcaagtgactcgggcacattgaggaacgccgtggactgaaacgaacggaaactgcctgggcttaggccagccaggaaattgcgcgaataatgtacggaaaacttggcgtcatgataaaatattgcctaggacatatcaagttctttagcactatgttcgatgacggggagtataagaagtcaccttgtataaacgactattgagcaggtctgctcttagccgtgatactcccgaaaggcttcgggcatgcttgagaactgatgacatccatgaacgtagtcatgggtgaaagtgcctggacgccacagacccattcaataggctcaaagaggtaatttgtctccgaagatgagaaaaagtcaagacattagaaaaatacaacaatcgcgcggcagaaaattgaatcacgtgatggatcgtcagaaagcgcgccattccgaaaagcgcaacgcagcgaacgttctctccagcaaaacagaaaaaagagaacagttgacctatttgttcgagggttttctattgtattgatcattgtcctaatactttggtctctattgacaattattcctgctccacattcacatcttttattgtggtgacgtgaggatttgatcttccctcccctcgctcttcgcgatccccatcttctctaagaattcgctttcacgccctacccatcgaggctacttggattccggttgctatccgaaccaaatattcacctcaacactaaatcgccagcaaatattaatttacacgatcgcatcctcccaatctttccttcaatcgtctgatttgtggaccccatcgatttgcattggaggggatcgcgtcaaagcaagtatcgtcaaccttgacctcggcgcgacttcacaaccatgagcgccgacgaagctggagacacaacccccatgtctaccacaaatagcgaacctcatcccgaccctgctactaatgcaacctctgggaaacggaagcgctccactcaggacgacaaaccgagcactgagtcaagtgctccagcctcgcgcgatcgaacaaatctccatgaaactcttcgcagcctgattgagcttcttctgaagtaagctttgatgaaagtatgctctagtattgtgctgacaggccgcagacatgacactgaactccaactcctctcttgccccttcccaaactcaactgctaagcctcgaacgaagcgcgcaaaggtttccggcgattcagaaacctccaacatccaaacacgcgtcaattcgggcaaatacaacacgttgcaagagtttctttccgacatcgaaagagcatcggctgctgtaattgaacgcaatcaaacacaggccaatggcgcgaaagaagatggggcacctttgaatgaggtggtgaaccggatcgcagcattcaagaagcatatgaacagcttgattggtcaatccttcgtcaatcaacccgaggtcaaaacagagacgatggaagacgataccgacgaatcatcagagcttcacgcgatcaacgtctgtcagcgcgaggataagcctgccctaacactcttcgggaacccatcgaatcccaggcagctattctcgagtcttcaaaaatcggtgaaggtgccgttgtccgaatcaggacctgagaagtttgttgaagtgcaagaggagctgcgcgaggtcgccctgcctaatggcatcgcagctaccaaagtaatccctttcaaccttgatgctgctcaagcatcgaagcgaacatttggggaagtgtttgcgccacgcgaaacattaccaaagctagaacctccgcgcaaacgatctcaccgggctaattcggccacatggacggatcgcttcgacgccactttcgatgtcaggacatttttgggagagcgtagcaactattgcctggcacccctcccttcaacccagtggcttcaatacggtggagtcacttcatcacctgcctactgggaccgtgtagaaaagcatgcagattcggagaatgttcatcgccatggagatcctgctctttggactggccctgattcatctgctttccagggtgtcttctcgtcatttgctccctcttacgacagctctggcgcgattgtacagctcgcttcgaaggacatggtctggtggggacaacggggtgcggcccgcatgaacaccctgctatcggtggaagcagacagcaaacaaaatgacactcagaccgcccagcctggcaatattggcgaacttgatgagagcattctggatgaaatggttgagtcattcaacgcccaagactttgctggagacatcacagaaaccgatccgattagtgaagtcgaaccagaatcaaaagagatcaagcaaatgcttcaggatgtttccgacttgctcgacactcttagttcctaccagcgactccgaagtctcaaactttcctctgatctccagctgcctggtcaacaattgcctgagtcgaatgaaacccctagccttgatctgggcgatgtgaacacgccctctgaagcagagacccttgtttatgataccctcaagtcaagccttgctgcagtcatcagcaacctgccaccttatgctgtcgctaaactggacggtgatcagctcgcggagttgaacatcagccaaaaggttttggttgacattcctgactacagtggtaccatggaaaaggatgacttcactttgtcacaagaaagagccgccgcattgctcgcagcagccagcgcagcaaatcgaacctcaaccccctccgcctcacgacccagtaattaccaaggctctcacagtgcctacaaccaacgtgcttttgcttccaatgctcgggctccgcctcagcccgggttccaggtcacaccgcagcacgcacggcaaccctcagttccaaatacatacacgcatgcttatggcgcggggcgtccaccgagcacacccagtcaacgtccagtcaacacccctcaatacgcgcaaatgaacccacagtacagccagggcagccaagctccccaataccagcgccctacctccaatggatatgcccaagtgtctccccaaccttatacgccacagcccaggcaaccaggcacattcaacgccacgccacaggggcgtacgccatacgcgactgccaccgcgaaccagcgagttcagtacccaggccagactccttcacaagctggctactcaaactcggccgctagtgccacatactctcgtagtgcggccgaacaagctgcgctgatggacaggaacaaggcgcaactagctgctcgacagtcaggccacagcccttcaacgcctcaacctcaagggtcggatgcccgtgcttcccaagaaggcagcatgacaccagggagcaaagcaaatggtacacccctatccacgtagggcagatatttgcactaatccaagcatgtggcattgtgttcccattcaaaaatgcgatttgtttctaaagatggaaactccaacattacatttctctacagtcggctttctgcttttgactttttgcattgttcttctctctctttcgtttccaattatgagctctgaatgtgatccgcgtccccaatttcttttctcccaactgtgtttttaattaacctcttgatcctcggttttgtatgactttactttttggtgttgtattatggactaagcgattggcgtggatggttttttttcaagactggtcggccggggtgtataggctgcctctgcgatacagctaagtcttgcttagagagttacttgtttctcgcttccgatgcaattcaatcaatatgctgcatatcagcacacctcgtgctttccatggagattcgactgtaaagggggatattgagaaaacgagctttcgaagcgttcctaaaatcatatctcatacagtacactgctatccccgatataaaaaaatacccatcctgctatagtatctcccagtccgctgtatcttctgcccaatgctcatagtccattacatgccaaacccgagatactcatctatctgccctatccaattattgaagtaatcaccggaaaatgaacgccatccctttcttccgtgcccagtagtgtgtacccatccaaccttcccttcacaaaaagacaaaaccaaaaccaagaaagctcatcgccaaggaaacacacaaaaaaagaaaaaagaagattcgtaaatcataagagttgatagcaggcagaaacccaactcacgggagtagaacatcgaagctagggaatgaacatagcagcaatagccatgaaaccgaagtatctagaagcaaaaggtcagtctcaaacgcagccagaacagagtcgaagcaatcatacatcgtagcacagcgccaaccatccctcgagtcgaccagtgtatcaataccagccgagtaattcgccgcaatagccgcggcggcaccaccaaccaccgtcacaacgaccagacgaccagagaactccgcaataagactgaacgctagcagtggcaacaggagcgcacccgatgcgatgattattgcgacgtagacgggtgctgcagcggccgatgcagccagtcgcggagtgagtgagaccagatccgcgtcgtggattaggaaccgcgtctcgacaccagcgatgggcttgtgctctctcatccagccgcgatagcctgcgatatcctgttccgaggcccgcgggagcgtctgtaggactttgctgtacgcgcagagggcgttgtctgcgtgctggtcagagggctactttgtgggatagcaatatgggaagtggaaggagcttactgtattgttcggtcttttggatcaaagcgctcatgagatccatgcggcggtaatgcagcgacgagtaagcctgggcctgggcgtcccgtctgcgggaggccgggaagggctttgcgccttcctgctcggctgtgctgactcgatgtatttcttcgtactcatctagcgtgtggagatcttcttccatttgggaaatctcgtcttggaggtggaggaggacgcggtggttgacggtctcgaagcgtcggtagagcggagggaagcttccgctctcttctgaagcggatttggttaggtgcgaggctagaagcccgtatcccgatggctcttgcgatacgttggagtctcgtctctttgtcggcgtggtgcggtgaagactatcttccgggcttcttgggggtgatggtgggagcggtggtctatggatcgcaccgttgtctcttggcgatccatggtaggtctgtggtcgggacagttctagttcgcctattcctggagaggtttgcgcagtcgagattgggctcggctttctagtgggttgtctcttccgggtgactaactgattgcctgtagaaggcgcgggttttcgtggctcttttggacttttcgatgctactgggggtgactgggtgactttcttcggggaaatgttgcctcctgagaccaacactccatgtggcacagtgtttgtccgcggcttaggagcctggatctgggtggtggattgtatagggcgtggaggctccggctcctcgtctgattcagactccgaggatgacgataacgaggatgagtctgaagatgattcatcgttctcttctaggaactcaaagacattaggcatcttcttcgactctggcttctttgggttcgctggagcgacaggcgcatttagggcttgtcttgacccatttggccgttgtgaaggtgaactgttctcgacagttttagggcttgcgacaggaccagcctgtgggtttgtagtattggacaccaacgagtatgtcctctttcttccatccttttttgactttctagtttggagcatgattatcggataagttcggaatcaagacccgattcatacaaatcagggcataccagggaaagaggagaaaaagagaaaggaacatgaaatgaatcgtagtagggaattcgcgatggaatcaggagaatagggactcgaggcatagcctaggggtggaattcaaggtctcagatcgagtgtcaaaaggtgcggaatcctaggaatctagggggggttgatggaaaatagtatatctccaatttccccgcgaattccatcagacattctctataataaaggaaattggtattagtattatcgaaacacgaaacgtcaggccaacttccaatgggaataggtttgtgtcagctgaaaagcccgaatggttatgaagacttgtaattcgtcacacgagtcagtccgggaacaatctgaagcaacttagaagcgccgggctttatttagatcgaccaatgataatcgtatcgcaaggagcttccttgtatccctgttgatcgcgattcaaagaaaccaagagatagggaaatggtgacgaattgccgagttgaacattctgaacaattcagtgtgggccaagttgtgacagcaaatcaggcctgcagagtctgaaatgcaaatgcatgtgtgtctgaacgaagcaaaggaacatgtatgcgctggtcgatcttccttgcatctggcggtctagcgaagtgggggaatgtgctgcagctatgtgagcagtgtacgatgcagtcggtacaacgccacctatctgctatattacgtgcatgaagcatgaagtgttaagaatgtattgacatggagttgagtagttatagagtgtagtgggtactaagtcagagggtaaatggagatcaagtacggagtacagagtatgttgtatagggaaggtatatatgcagtttcatatttttatagttttaaataccattattgagtttataatggcgatttcctctgtgtcacaacatacaatataggtacaacatcgtatatcaagtgatggcatctccgttatctgggctgcttctagactcacctgacgctttaagtatatgtcagcacggactctggaagtcacgtggcgcataattgatgaccaatcagttgtgacaacaatagtgatgcagtacgacaacactcttattatccaactctcaaagctctcaccttgacttaattcgccagattcctataaatttcatgcacattagcacaaaccctatagttgttaacatcagattttactttcgatccctgttgggctgttgggatcacactgtttctaccaagatacaagttcgtcgaattataaacgcaagattcacacccacgcacaagtcatcctcagtgaaacctacacgagtggcgctctagtagctatttacttctcagattcagataatcaaggaccgtggtttaggcggggctaaagaccaaccggagacagtttatgcgtcagccgctgaggtttcggcggactgtgaagcctttctgaggaaaggtagaactctaagtattatagacgaacctctgattgaactgctgcaaagatgaacaaatagaatgacagtcgctatttgttccagaacatgcagcttaccgatattctgagtaaccgcggggtaaagcatttacaaagacgtctataaagacacacatcctcctgaacacagcacttcccctgatataataccaggaataccaaaatgctaccactcatgaaaggcaaactaatgctctttgacgaagtagcttgggacaaaagcgacgagcaactagcaacatgggaagcaattcttctcaaccaagaaaccatgcagaagataaccacattaatcaaaatccaccgtcaaggcataacagatcaactcttcccgccacaaaaaggctccttcaacatggtgatccgcctacgattcctcgacggcgcctcggccataatccgcttcccaatcccaggctactcagtcttcccagacgagaaactccaccgagaagtaagagtgatgcgctttctcgagcgacacacagacatccgtatcccgcacatcctacaccacggcaccagcgacgaaagcccacacggcctaggcccgttcattatcatggagtatatcgaccataacgcggatctcgtggatgcgctgaacacacccgggatactggatgaagaacgacccgttctcgatcccaatatcggcgataacaggctgcgctcggtatataatcagatggcgggcttgttgctgcaggttgcgaagtactcgttcccgcgtattggatgtatatctaatgctgcggaagacgagttcgaggatgagtgggtggttgcgcaccggccgttgagtatcaatatgaatgagctggtgcaggttggtggtgtgcgagctggggatctgccggggatgaccgagacgtttgcgactgcggcggagtatttacttgcccttgcggagctgcatatgacgcatctttcgtcgcaacggaatgacgctattgacgatgcggaggactgcaggacgaagtatattgcgcggtgtttattccggaagcttgcgagagagggccgactatcttgggctggggaggaagggatgtttaaattattctgtgatgatctacgaccggcgaatgtgcttgctaactcggactttgggtataagatatccggggctattgattgggaatttgcttatgctgcgccgttggagtttgtgtatagcccgccgtgctggctactgcttgagcggccggagtactgggataatgggcttgatgactgggagtgggtgtatgagagccggttggagattttcttgcaggagctacatatgcgagaggatgttgacattcggcgtggggttatgagtgaggaaaatcggctttctagacatatgcgtgagagctggaataatggggggttctgggttagttatgcggcgagaaggagttgggcttttgatgttatctactgggcgaggattgaccgtaggttctttggagaaggaactttggaggatcggatcggattgttgactgttgaagagaggaattcgatggaggattttgtacagaggaagttggctgagaaggaggagggaggtttgatatgaagtttatatagggcataagttgtagttatagggctcatacaccctatggtcacgtacttccttggaggtattccattaatacatagctatgaattaaatttgtgtatattcacaatatcctaaagatcttcttgcacctttaggacttctagatctgttgatttcgtcatttggaatatcttcaattcaatttgaccacccgagctcgtcatcgcacgccccgagaaccggcgccattgcggggaaaccagccaccatcgaaattctttgcaactactttgtatatctagtatgatttgccttgctttatcatggaggtaatttgggtatttccttattcctcactcaactaatgtgaattcttctcaggtgccaaaagcccggggagctggcaggtcaggcccgcgtcgacgaacagggtgcctaacatgcaggtcccgtaaggtccgatgcgatgaagcgaaaccaagctgctccaattgcgatcgactatgtctactatgtctgtataaaccacgcaccgcacccggcgtgaggttgggttcatcgccaactcgtgcaaacaagactactgcatcgaataacacagcacactcggggagttcaggctcctctgctgcagccacgactgcatcccgctctcccgacataaacttctttaataccgtgctccgcgcagacggccacacaatacccgcgccaacaaccacacttcgacagctccctacagaccagggctcccacccttcggagtttgacatgctcgtattcatgggcgggattacttctgagctggaacagaagcacctggacctggctgccggacccgcgatgactttgaccgctagtccagcgtcgcagtcgctacgcgggacactcacaccagaccgtcgcattcttactccaaatacctcatcttcgggcagcgcttcagacatgccaactagccggggcagcttatccgatgcaggcggtatctcgtatgaggaccaactgctacagcactttctgaccattggcccgccggctgctctttttgcgccggtcaacatcgagtggaagtatatgcgcccagcgctgctggttcatgcacgagattccagtccgcttttgaatgctttatactgctacgcggatgttcataaagcgatgatggaagggaaaaaatggcacttcgcgcctaccttctatagagtggctagttcggagatccaagcttgtattcatggcgaggtgacggagtccacactcatcaaagtttttggggctgtttttctcttaatgatatccgaggtatgttctgcttagtcccgagatcgagcgaacgctcatattatttcagcttctctcaccctacggaatatgtaccgggacatcttatattcactccgggtaccttattctacaacgattccatgatcgtactcgacattggaccggtctcggtcatcttttggtgtcatggatcttactgctagatgtcaagtccctgattgcaggccgagatggcgatcctctccctgaactcggcaatatcccagaacatagcataacacaaccaccggatacacaaacttcccaaacatctcacataaccgcaccaacagccaactttaaacaggaggacatcatcgaagacccattcctcagccccaactacctcgtctacgaagcaatcgtaggcccggcattccgattcttcgtacaagcccaacaagtcgtacgacgcatagtctgcatcgacctccaccaccgcagccgcggaactctcaccgacgagttcgaagtactccaactcgcccacaaaatcggcgccgatctcgaaacactctggcacagacgcccctcagtaatagacgtctacggacggcccgaagctctaactgacatcctttgtgcgcctgtggcatcggaaatctgccgcacattccgacaatacgtggccaacttcttagcgaattttatctacttgcaccgcgttgcatttgcaatctaccctcgcacagaacgcgtcaacggcgccgtcgatcaaatcattcaactggccaccgttgactctgccgggccagaccatctgcccgtcagcttcttatggccgctgttcattgcggggctggaggctacggaggaccagcgcaagtggattggccacgagattcagcgtatggctgcggcccacgaagctgacgcggcaccttcggccactcgtcacccgaccgctgatagggtcctagtgctcgtggaggagatgacccggcggcaagatgtgtcacgcacatgggcagactcgaaatgcgtgaggcgggaaatgttttcggactttttcgttgtgatttgaacttcatgttcggcatgagaggtgtagagattttctcataaaatataatacgaagaacctacaaccatttcaaatattctaaaccgacccagatccaatcgctcgatatgacactttatctccgcccatacagcgtgatcgatgcagtaggtgtccccgttccttgcgcacatacgtcgcaaaacagatcgcagcgaccgccacagccccagaactgatcatcacgggatacctgaactgggccggcagcgggaaagcaatagtcgaggcaaaagaaagcatctcgaacacattctgcagcgccatttcagtagcagagaagcgggcacgggcatgttcctggatattctacatcacccaacaagtttagcacatgcacaagtcaagaatacggaaaagccacttacctcctgcacgagaaactggaccgacaaatcgaatccccaaagcccaatccgactcaaagcaacgcccgtaatcagcgcacccgctacgaactgcgagctagggtcccagaaaacgaaagccacggtggcagcagcgatgcagataaactgccaattcagaaaccacagcccggagcgaatcggaccaatccggttcatgaccataggcgctgtccatgtcccagatagctcggcgaccacggagccgatgcgcatatagctgacctccaacggggtgaagcccgtgtgcaacaggtatgttaccattgttgcgccaaaggataggactgttaggtagagcaggctcagggcaaaggatgctaggaagacgggacttgctatgtactctttccagggcgctagtgagcttgacaagcagcgggtatcgctcttgccatttgtatcatctgcttgtgttgtaggagcttgtgtcttggtcaaggccgggactgattggtagacctgagcaatggccaaatactcgaccagcacagatgcggtattcatggtaaacactgtccaaattgcatatggggttgatatgctgtcgatcaaggagatgaatactggtgctaggagcttgcagaagagatcaattcgtctcatagaggcgttcaagtctgtggttcgaagttagatattgcggagcttcagctagcttcagggttctcaccttgtcgagggacattgatactttccgagatcacgattgcctagtgtcaaattatcagcgacatctcttcctaaaataagattgtatatcggatgcatggaaaccagacaacccaaatacgattcctcgtacatacccagtcccgttccacagccaccgtattagccgtagcggccaatttctccatacaagccagtaagccctgcacggtgaacaaggcaattgtaagcgaccaagagtctgtagacagagtggccacaaagcataagcatgagatcgcgacagggactctttgccacactactcctttaattagccattggccttgatactcggtacatattgaagtatccgaaacgattccaacctaccaatggaatgcctcacagcaacgagccggtctgagcgatcaacttgcgcacccagccacgacgacagcgcgacggctgaaaacgcccgcactagagcgtatatcgaagcatacagtagtgtccccgggaagatcgaagctaggaagagtacggcgccgaattcaaacatgcgggagttccatgttgagagtgtgtgagatatgtataggcgtgttagtactgagtgggcttctggtgctgggctatcattttggggtgggccatcatccgccaaggtcggcaacagagggttggaggaattgctgatgtcttctgatggttgccggctaggctctgggaactcgctcccaagaaccatcttgaagcgctgctggcaatttacagcatgtatgcaagtgtcgggtcgaatgcttatgtggatttgacagcaaattgggcggatcagcaatgccgtgggtgggctgaggaccctcgtggaaacttttatatcgtattgtctatggtgttctatttgtacctttaaatctcattaggtttgagtccatccattgagtactacagttattttctatttgaaaatgatcgttaattgcagattcaggatttgcaataatagtatggtatatgggccaattcccaataaattctaatacacccgaacagcaaaaattacaagctataaacggtatcccactgtttaatccaaccacttaagtccttcgggagatgatgtcgttgtccgtcgggcaatcacctcgaccacctttcggcgcacaccttcgcggtgggcgtatttctggaggaagtagtcgatcacgggtctccgcgatgaatgtccctcacacacaacctttttaatctcatcttcggagggaagggcgaagtgggcataagggtatttagtgtaatctccctggctcagaagcggtaggcgggactcgttgtcggggatctcgaagaagtcgtccacaattttatccgagacatcttggagagtagcgggctgccactgggcctggcggggaggcttggacatcagacgggccttgacaccctcgacgaaatcagggtggcgcatgaatttggcggcgatctcgtgctcgcgctggaaggtctccgtgatggtccacttcttgccaagacgcatctggcgcagagtcaccttcagagaggtcggggagcggcctgacagagtctccaatgtcttttgtgcccactccttgtgctcagtttccttctccaaggcctggataatctcttccatggtgttgaatccgaagcagcggtcaatggcagtacgcagggtaccagccatgagcatcggctcctcctcaagcggggggaggccaagggagaactcagccatggtcttgttcacaatttccaaacgctcgcgaagctcgacgtggtcggggaaagtcagctcggaaagacgctgagtcacactgctcagaacactggagtgcaagtagtgtgtggcgatgcctgcgtacagagcctgaacacccttcaagcgctccgaggtcaaagccaggtatgtaccggtctcaccatccagacgcgggaggaagaaggaaccgccaacgtcggggaagaagccaattgtggtctcaggcatagcaaaaagggtacgctcggtcgcaattcggaagggagcgtgcatgctgaggcctacgccaccgcccatggtgattccatccataaatgagatgacaggcttcgagtatgtagcgagcaggtggtcaaggcggtattctagtgcgaagaagtccgctgatgctttttgtccctccactccactctcattctgcagggccagagcagcaacgtcacctcctgcgcagagagccttggtgccggctccggagatgaggatcatgtttgcaagatgagatttctcccactcctattcatccaacgcttagtattgtatgtgtctgaagttccgggtgtccattctaaccttcaatcgagggacaatcttgcgagccatcgagccgttgagggagttgagcttcttgggtcggttgagttcaacgctgcggaggccgtagatcgagttgaacaggacatcatcgcgctcatcgccggggagctctttggggatatcagatgaagtcgacatctaacaaatgtgagcactggatatcgggcttctctccgaatagggtacataccatagctgttgcccgaaaggcagggttggtcaccttggcgcgtagaggcattgctgaaggaacgcgcgagatccagctcggcgaggagacgcgattgaattgtcgaagtaacattagaactggaatacgacgataaccaaggaagggcgttatgtgatgacaatcaggtatttctccgctttccttgacctcgggagtttttcgctggattttctttccgctccgactctccgcccataaccgaccagctcccaggtacattcggcgacatcaccgcaattgatgtcaatttctaagtggtgtaaatgaaaatgggttcaaatattctaaaagtgctatgatacaaaaagtcagctaagtactgaatatgttgtagctccaaaaccgactctgagaagtgataacgttcgaagtatagatgatctatttgtacacagctagataatgccagaaaaacaagaaacagagaatgatacaattaaacgttgctccatgtggccttcatccggctaaagtccagcggatacaccttctctccgtttgctgaaggcgaaaagagagtgtccaccttcgccaagtcggtcgaatgcgaaagcaggatcttgtgcagtgcattcttctcaataatcaatcttgctgtctccaagacattcttcacatccaaatcctcgacgctgatagttcgtgcgtggttgccgaacttttcgaccgcatcagagaacatctcattcggcttcagtgtaacgaatgtagaccggcccttctgataccagccatgagctttgatgaggtttatgatgaagaacgggctcgcattctcattgatatcgatactgttgtcaacaacaatcaattcgccgcgtgaaagccggtggctgagggcaatacgccaggcttggtcgtagatctttcgtggcaaatcggtcgagaaatcacgaggatgaggtccgaaagcgacaccaccacctcgtcgaactggcgacatcttgtcacccgcacgcgcacgaccggagcccttctgcgcgtacagcttcctgtgactaccgtgcacatcgtccctccacttggtgctggcggaaccttgtcgggtgctgtcgccctcgtagacgactgcgcggtggaggatatcgtgacgagtgggcatctgaagtagccgccgggagtaatggactaaacgctggggttccaagttaggccaccggtaggtcatgacttgaacaggggttgggccccctggtcgttgcgcctgttggacctggacagcatccttggtcgccactgggggctgtgtagtggcttcggttgccattgagcgtgtaaggcatcgttgctgtatgattcgatacgctgtcagtaaatgcgtccgagaaccggatcgagaagaattcatggagtgcactaaccgtcacttgcttcgggcctgacatgagtccgcccgagctgcgggacagcagcctcagtgaccgaataacatcgttccctggcattttgagagtcactgggtgatcggcgtataacttgatgatgtccggagtctcgaatggagcaaaagttgatcccgggcggtaggtgctagcagaaccttggtactatagtacccaagtatcttttgtatgattttcccttacaaaagatacttagccgcataatacacaatatgaattctcttgtccggttgcattgaatcaagtgtgtatgtcaagtataatttaattgtagacaggactttttaatttattcgatgtcttgatgtattcccgggcctggataccacttggaggtcacgtgataggttaagtgaccgaacagaaaaagttccccgggaagacaacaacatcggatcctcaaggccaagcccaccataacctccaattcctcgaatcatggcccactgcgagcgggcttcgaagcctctgctccaatgccttcgcaatacctactctagaggcgtggctggagtccagctccaaacgcgagccttccagtcgaccgcgagtgttcgagatgccgaagttgaaactccggcccaacctttccacaaggcacccgatccctctcttgtgacgagtccccgtctcgaaagacgtttgctccgacagggaaccgcccccattggatcacgtcgtcgccgtgctgcactccaagattcagagaaccttcccttcgaacaattgccctaccaatgtttccaagaagcccggaagattttgcttgcggaccgcgaagagaaattgaaggagattgaaatgatgaggcaacgccttgccagacaggaggctttgtccgtcgaagaggctggaggagcaaaggcgaagaaatcccgtgttactgccatgcaattacacctggagcgcctcaaggttctggccgatattaacgatcccttggtcaagcgaaagttcgaggataatgaaggtaatcatctcttgatcaagtgatcaacctgggctgagactaatcgttcgatttctaccaatccaggtgacatgtccaagcccatctatcgctttttggccgaccgcaaatggcgcgaataccgccgcaagatcctggtccagcgtatcacccagatgaacgtcattcccgatgtcctccctcactgcgaccccgtcgtcgagacaaagctgtacttcggcaagcgccaaatccaagccggtgaattcgtcgaagcgagactcagcacgagcgcgcctaaactcgacgtgcaaatctttgaggctggtgaaaagctagtcactattgcagttgtcgaccctgatgtcccgaacgttgagaacgacaacttcgattataagacacacttcttggccgtcaacgtccccatctcggccacctccaccaagatcgatctcgcacagcttttggaagattcgcaggtggttctcccctggctaccacctgttgcccagatgggaagtccctaccaccgcctctccctcttcattatggagcagaaggagtcccagcctctcgactttgccgccgtcaaggccaaggagtctaaccgcgacaccaccctccttcgcagtctccagtcccgttaccatctcaaggccatcggtgctcacctgttccgtacccaatgggacgccacgaccctggaggtcatgaaggagattggattcgacggtgctaatgtggagctgcgccgcaagagagttgagcctctgccatataagagacgtaacccctcttcgttccgctgatcttgtttgtcttcaagccattgtattgtacaatttgatatatgtatgaatatgcacactgatttaatccctttcaaccaaactccatgcgtatgcttaaacaaaatggaccagagtgccacgcatcggtattgtaatccaccggtctaatataatgtacaatgtataacccttagatgttctgggaatccagttgcgccggttgcaacggattggtcacccatcccatcttcgacggaggccataccctggcaattatcttcccattaatgagacccatgggcactgggccgtagttcctcgaatccctagaccagggaagattatcgccggccaaaaagacatgaccttcggggacctgcacaaagtcaagtcagcaattgaatccaaccagaacgaagaacctataacccacctgaatcatatttccatccttgccaatactcgtgctaagcggcttgtcttgacagacaaaatccccaggcatgcccactacccgcttggccacatgcacgccttgaaagttcgggtgaccatatcgcacgacatctccgacctcgattcctttgccattgcggtggaggcgcgatatcatgagccaatcgcctcgcacgtcgaaggtagggtacatagacgggccctcgctgagctggacagttatcaggtgctcccagatcagcgcgcaggcgcagaaagtgctggtgccattgagcgcaagccttccaatggtgcgcagattggcagcctttattacagaccggactaactgctccatgtgtggtgaattggaagcataggattgctcagatcgagctgcatcaactattccgcggtcgggagctggtcatgtgactatttggtgtctttaaattcgatttttttgctccacatcctccccttctgccatcatcagtcaatatgtcctgtgtcttgaaccagcgattgataggatattgccgtcgcattggattttaatatccaggacccttccagccgtatcagctgctcattaatgtttcgtgggcgctgggctgagagggatctggaatttcattcatgtctcgattattcgaacatctctacaatatggagatgttcaaacagtcaatatcctttacatatactccccataccccttacccctacccaatcccttccgggatgtccgcttctccaaatgctagagcttgccgtcgccgaaatacataaccaggacgagcacgtgtggaatatgaagcaagatgaacacaaccagcctatcttctaataggttgtcccccagtgtgcctcactttgaccccatttcattatgggactgggtttttgaggcatacatagtggggagacatctcaattagacaatttattctcattttcggtttctcatgctccctatctctcgtaaccttcttaaacaatatggatgagattatccatgcgtcaatcaatgtgactttttgtaccacgaatcagcatctaacaaacatgtaagtaaactcgaatcaaagccaattaagaagcatagtacataccgggatgcttctcgaccggctcaatgccctccctcttcttcgccttctgctgatgatccacgccatacctcttgtcccggtcctccagcaacgaatccaaccctgcaggatgtgccaacttcacgctctcattcgatacaaagctgcccatcaactgcggctcgcctagaggcacaggatctccacgatcaacctgccagaaatgatacgtcttgccatagacaggcgcaacgtcttgcatctctgccgtctccgcagcttcccagatagcgtcgggcacaccagctggtgctggcatgaccagcatgccgcttttgacctcgaactcgtgcgtgtgccagagcttacgctcttcggtgggaagagtcacgaaaatccgcggcgagatcatgtattccacgccgatgaggcgggcgtttgccttggatgagtcgtagattaggcattggcggatatctggataagtattaatgcccagcacatcggtcattcagttgtgtttggctatagacatggctgttgtcacataccctctgttaagtgagtgcaatagtgatcggcttccagacatcgagttggatcgttggcgtaaaagtggaatgcattgagatgtgcgcagatttgctttacgggcgtgaagtcttggatcattgaggctccagtctcgagtactcgactcttcattgtccgcggctcgtctggaagttcagttccatcgttgcagcagctctttcccgagtttgacattttgtatatacgttgggttcagggttgtattcgtgaattgttgaattgttaggtgttcattaatagagtctcccataaactgggatttgtactgaaatgatgtaatccatgcttccattgcattgatgtcatgatgattgcggacttcctatttgggactgtttactgctacagcatatttgaaagtagctttatcattggtagaagtaagaaaacgatgatatgtagtcaaaatttatgcaggttgtctatgcggagtatattttatgttatccttaatggaatatatgcatataccagcttcctcatagagcgacatcacttgttcgagcggttgtattaattgcgcttctgatatattggacttaatctgccttgataactcaaggaacagtctccctttgctccaacaagtcataaattggagtttttctcatatcaaaaccgccccgaccatcaaaacggtgctcatatatcttccgttggcagtaagctattgctatatcgtgcactatgctccactcaagcaacctcgtgcctaaagccttattatcggcctcgagcgtctccaaagcctcctttacccacgcgacacaattccatcccggccgactctgtcggacaggcgtgttgcgcataatttcggctacatgatatccgtccaataccttgccaatcaggatacgaacaagcaacatgttgccactgtttagtgaacactcaaactcttcgaagtgccactcagagccccctcctaactttgggctctcgttcgcgtggtaacagaaacccgtgctattctcagtttcaaatttgggccctacaatcacggaccagtggtacctaatcaagacatatattagtcttgctagtgacttcaagctaaacagcgtcatgaatggttctcacgtgtcctccttgtctggcatggttactctgcctcgtcgtgcatggagcgcaacatatatccgatctttgttggcgggcattgcaagtgaagttgaccaagatggctagatatttgctaatgatcgattattgctgaaaggatggtcgtagtggggtcttctctaaatccagtctttaccgggctctatggatgtctttatatttttgtggctcaatgctaaaagctttctattttaagaggagcgtcggaagatctactgcaacccaagtcacatcacatcgtacccaacagcgcctatagcattgggtaaccaatatgggcactttactcggataggtgcatcgtacgttaaattgaaaaaaaagggggccaatggcatttgaagaaactccaaccaaacagaaaacccccgcgaataggactgggcgcatcataaaaatagaaattcgaatgcaattagcggctcagctagcgtcgaatcaattcttagtgtcgtgtcaatgctttctgggggtccctttgtcaagagcatcaagaacacgtctatccatctaagtgcctataaaactcacgagccagtctttctccatctcattgtgaggatcccaataaagggctttggccgacagaaatacatatgtggcatcaccatatttgaacgttgtggaataaggtcccgctagagaaacccgtttatttgcacaaatggttaggaccacggggtatttgctgtttgagggagatcgccatctttgttggctgcactccgccacgaaaagctgtctcgttgccctgccgtctcccggggtggatgagcgagctcgatcggcatagcccctatattgcggactatgataatggctggtgttttttctttcccatttttgtcacgtctattatcattgaaggatacaaaccagaaaaagacgatgaaaaagactataaagatcacaaaagggaccgaagacacaacacaaccggagtcattcccgttgagtcatattcatctatggccttctttccttctttcctgttccatatttcgtcacaaaacaatcaaattgcaagatgaaggaagagcttccgggcttgcaccttctagacgcagagacaatcgtacagcgcctgtgataagagtcaagaccgacaggcctgcctagtaatctagaaatccaactatcttctgttacagatgacatgtttgacgaaatagcctcttttttgtgcactatcgagggtgaatgaggatgttatccgcatagaaaaggaaaatatggaagtatctagagatatagggaataattcaggaggaacggaaaggatggagaaataatgttcctttctatatcaatcaaattcaccaacggtgaaacgaaccctcaaaccattactccctccactgtctgtctatctatatgccatcatcctcctcctcgaccgaactctctgtgacatatgcatcccacgcctcacaagtagaattcaaagtatcataatcaatcagggcccgcgcctcatcatacctctccaagaactgaatagcaaagccctccgaagtatgccatccaatatggcaatgcatcagccaagctccgggattgtcagtcttgaacgcaatggcaaggtacccagaggccgggagcatggccacatcccggcggggcgggttcgtcaagctcgtgtcatcggaggagctgtacgtgcccgttccctgcgcgatgacaaagaagtcgtggccgtgcaagtggataggatgcgggacagccagggtagtttcgatgacaacataggaccacttgtctgcggtcgggagcacaattacgccgctctcctcggtgaatgtcgtgtcgttattccagacttgcaggagtgtcgggttatcccagtatacttgcattgctgtcccgttcagctgccagcggaagtagctatcggagtttgtgcctagtgtgactggttcgctggagttgtagtatggttccgatgcgctctgggccagatacgggacgagatcagagatgtccatgtcgtcgcaactgtcggtgtacgtgtattcggtggtggtgggagtggatattgtgctgccataataaacgatgcctttgatattgtctgcgctgtcattgtcggagcaggcggcttggggaattgcgcgcatccagaaactgtcacttccggtggattggtctgcgctgaccacaatatcgtaccgctgacctagatagaataagggttagtaaggtcatatgtaggttggtagggaaatggtctcttacccatgccgatgttcaagatagttgtggtaaatggctcgataggtaccaagtccatagccatcaccgtcagagtatggttgtcaattgagaacttgaagtgggtatctaccgcagcgttcacaagacggaagcgataagaagtgcctgcagtgaatgatgtgttgaagcgatggcctgtctgggtcgttgaatcgtcatctccatacacattggtaccgttgatgagaccattgtctaatgtaggcgggccattggcctcggcagagtaccagagttgatcaacagtctggtgactccaatcattgaggaacaaaactcctttgtccacatcatagttctcagtggcaggaccgttgatcacaattccaccgaagacaccttcgtaggcttgcaacccaatgtgagaatggtaccatgatgtgccatattgtgtagctttccacttgtaggttgttgtctgtcccggagcagtagggcattgagtaatggatacaacaccgtcgttctggttggtatagttctggcggatgccgtggaaatggatgctagatccattctttgaggtcagactgttggtgacatgaacgataacatcatcgccccagtcagctatgatggtagggcctggaattgtcccgttgactgccattgctgcacgagagtagccatcgggagcaactgtgacatcttcgatgttgaagtaatactctctggtcacgccggtggtggggacgacatcgtagtagttggtgctcacgtcgtagtcgcaccaggtctgtctgtcactggcggtatttccagagcaagcatcccgctttagccttgtatgtttgtcgtgatggatcgaggttgcggaggctactccggccaggatcaaaagagtggtccaaatcttcatgattgcttgacggtcaagaatgctagcaatttgaattttggcggacagacacgaagtaaattcacaagaatgaaagtttaaaaacaaaaggaaggatatcagcgaatgtaatattgttagaaaggactgtcggactatttgtagagaaatattgatgctacgaactattcttatcaacatatatagatccccgacgctctatcattgtgacgccttacaaggcaaattggagctcatatccagtatcaagagggtcagtaagctagtgaaatcaatgacatctgattggacttgactttagcacgacacacacctgagggtgcgtaatctcaaagtccgacggagtccttgggtaacggatccacgtgccggatcgtgccgaaccatggtttgtctatctgcaagcctatttttaagctaattcgaaccgcttgaggggaagatgcacgaagattttctacaaatggactggacttgcacgattggaaactttgccctaatgcaagccaccgtcacgaattacgtggcatatagtatctaagataacaatagagagaaatgatgatttctgaaaactaccatgcctcaattgccacttacatgaagttgccatggcgagtatccgtttttgatcaatctctgtttatcgaaagatgtatatcaaccaagtaacggaacagatatggcccctctacgccctaagcagataggctcttgttctaattcggtgatagaatacaacttattttctatccacaatatagactatcgtcatagttttggagatctcaaccagattgggattaacggacgaactcagcccgacccaataatgctactgtagcctatctcctcttattccaacgagattgcgacataggctgcaaggcagtgtcggagataaagtctccgcttgtttcaagctaactgatattcttcaggtacctgacaggaaccaccacggcacgtcagtcaacgcgtgtcccggcgcgcggcccggactcatgcaccaacccaattttaacaaccccttagagactatgttttgcgatgaatgattggatactgcacgctcaccctaaatttcgactaagtggagctctccctgcgaggacgtaacatgcaaaaggaccatgtaactatatagagaacaataggatagtcagcttcctgtcaatcttatccaaggttaaacatctttctcattatctgctatccactatgttcagttcctcggtcttctgcacggcgctgtgcctgggagcgtccgtgtacgcttctgactttgcctctaggagcactcccggcgtgggtgaggagttcggactttatgcgtatggagacgcaattggtggtctctctctgttctacggaaatggtaggatcttaacattcaccactatctagaaccgtattgaccaggtgctaggcaaggctctgattggtgacccagccaattcgactgcttcgaacacttcaagtgtatactgtcagtgaatcctacaccctgcagtcatgaatttgtgttaatatgggacatactagtcgaacgttcgtccacggatagcacttggatcgccaacccgaacggaaccaccaatgcgaacgccagctggtctgaccagatgctctacattcccagttcgtcatcttcaaatgatgaaatgggcttcgcgtctacgaacgcgtcgaataggactacaacaggtttcatcttctacggacaatggatgatggtgaaatctgattctggcgaaatctcttccagcttctatattagagagaactcggagggcgaagggatttattccttgctgtggaatgcgtcggatgatgcaagtgctattccagtgtccttgcgtactgcgaagccgtctgattcttgagatattggttgcaaggaaaaacagaggttgtctgttgtgatgattagctttggttctatggaaagaggtcgcccttgtcaagtcaagtccaatcatagctatctgaaaaggaatagaaagttttatttcctatctggaaataaaataaatatggctataatctagatctaaatctagagaagaagaagaagaagaaactgtgatcaattcaaagatcatggtcatgcgatatcttcccaagaatgtctcttactctgtaactgacattttcatattaaaaacacttaactagattgcctgaaagcatgtttaggtaacgaccggcttctttgatagattggttaatggtgaattcgatgcattaccaacatgaccttattcccaaggttcacagtccgatcaaggtagtcaagatattcgagccccggttgttcttcctttgaaaggagtacatttaccaagtttgggatgctttcttcttggtaagccgaccatctggaccattaccaccattgaacgcaatgggatctgacaagctagtcgatggagattttcagcgcggccttactaccacgatatacctcttgctgttgttgccgatgcttccttgtccagacgacatcacaccgataagacctttcggagccacatgatgtgccagagtttcaacgacccgcatgaggctaagcgaattcgtgaccatcacatgtacaaaatcatcggtggatacatctccaattgtttggttgggtcacgatttgtgattccagcgttcacaaaaaggatatcgaatatattgcccggcaagcgcctatcgagcgccttgatttaatcaggttggcaaatgtccgaggtcctaatttcaacccggccgttgtgattgtctgctagctcgtggagtaatgtccgcgcccctccgccgcgcactgttccgacaacgtttcaccccttttctacgaattctgcgtagcaccgatgataaggatggtggggggtaaaatggagattgtgccgagttatgctcagacttaatataatttggtaggttaggctccttttaaacccagcaagtcggcttggcagtttctagtgttgggtttatctccgtcagattccctttgaagccggtgattctggtatctgtagcaggtcttcccatattaggaaataacccctgcttagccgtatcgcgacttataagattggattcagcgtcgagtgatggtgaaagagcgaaaatcccgttgaggggggtccatagggatctgccgttgataggcgacccaccatgtaggtcatgcagtgcagtggagcccgcgttttaaggcctccgtgtcaatcgtgtccaccctgccatcatcctactcttcatcaatgtggtcagtgtcaacatcgcaatctaattgttctccaactgcagatttcttccagcccatgagtacaggagccggagccgatatctaagatccgaaagcgccaggtaaagcaaccggagtatttcagctaggccctctctgtggacccggtctagcgctagtgataggtgctttgacccagggtctaccctcaccatatttggcggtgtgatgctggtgctgattttcctatgtttgccggacaccatggcaaagcgcgagcaaaatccgcagatcgaggagcataacaacatcagcatgattttcaaatattcatagccgtctttggcccgttcaaggcgttggccctgccccgctttcacccccgtcatcacctttactatgtgcatcatgaacgtctccatcaaaatcatttccgacaaggctccctaaatcttcaccattatcgaagtaagtcttgtatacatatcactgacaatcgtgtacgccatctctcaatatctggtggttcgctagatcgactatatcatgatccgtgaggcgacccaggcaaatcgctacgatgagagcggcaagctcaagttccactccctggaggggagcctgaaagagaagggctctttattgtcgactttttacacaacctacgagccgataaagacaagaaacccagcttgttagtctggtgtctggttatctatctttgctttgaagaattcccggagaagacttatgcctggcccgatttcgtccgtgtgactattgcgccgaagaaactactgctaaacaacaagcagtgatgtcaaaatggactctcttccaccttccccaaatcctagcggtgcaactgcgaagctgagcaccacagtcccgcctgacgttggtcgattcgcaatgttgatacccattgatataatcgcaaggttggcaatcgatgcagcagctaactcgggctctgagccccatatgaagtttataaaggaatcagtattcaacaaaacgctgataggatacttcgaaactgtccctgactacattgcctgaacaagttgattttggatggaggccaatccttacaacggcggtgtggacattcttctgtgcataaaagagggccaggaaatggactaccatagctcgggggaggatcaggatgccccagcgttggtcttcacgctcgtttcaattagctcaagggagccggcggattcctttcattgctcacaacaaaaggagagaagggggatggatggtgaatggaatggaaagatattcagggcttaccaacgtctaatgcagcccaggaataccacaatcattgaggaatgtgttttcgtttacgatatgagatcttttctgaataagatgatatcgtcgaactaaccaaacatttccgtgaacagtacgaggctcagactctgtctattccaggacgaaatgatgtgcgcttcggggatcggatagtacagcatccgattccgaaaggggattctgacgtgattttcagacaggagaatcagcagcagcaaagcagattttaattctaagtcagaagacacgcagctgctatggaacaagagttggaaataacttcgtgtatctgctctgggttcaatcgttggttgcttattcctactggccatttccatgatatggcacacgtacgtgagtctaaactacacacaacatactcgtgagaagctaaaatcaaccaggtgtaatgctgtctgatttcggatgcgcattcaatgccacatgtgaacagtgatagtgtagacactgtacgatatcccgcacccgatcaggttgacggaaccccatgatggagccgtcggttattgggagtatggtctaatcagattggggctgcttctgcagatattgattgggtctctctgggaagcagggaattaaacgggaggataaattgacatgatcgaattttgacatggtctctctggtcgttccaatatatatttccattaatgactgcaccgaagcttccatcgcacatcgatggcctgataattgcgtcaaggagaccagaatatgaggggaattcgactccatcgcacgctctcctcactgggaaaacggcctacatatactccatataaagacttggctataccaattttaagaaaacaagcctcatttacatctcacgatcgaagatcaaaaccatcgcaaagcctaaatatacgtagcacacacataagcggtaaaattatttctcgaaataaccacagcgcaacaccgcaacaccgcaagcccgcaatgaacaacaattaatgtgttattgtagaagcctcatccacaccaagactctgcactccacactccaccggcgatctacaagattgtattcgcgtaaagtgtaacagcccagtctactgcaatggtcagtgcccgaaatcaaaaaccaataatgcgctcatcactcttccaaagttggtaacacacccacctttattttgtatccaccactgtgtgtcggtgttggagcgggaaagaagcgggagagggactccgttggaccatttgtccgatatggcaatgatactcggttttagtgggggctgcgacttgggtaagctggtaaactggggctttcagggggctgtttccactgataatatagttttttttttcttctttcttttctgtgggtgatcctttttgggtgatctttagagtggcaacatggatttaactatggagtttgtatggagtaactataatatgcggaataacacataacgaatgttggtgcgctgtagctgcatatgtaggggagagttggaatggcaagataaagtactgtggactcggtgcatattgcagagtacatattgtaggcggcctgagtataaatatacatatacgctgtacgttgtacgctgaagatgtagacttgtatgtggggatacatacggaagcactgtatatcacatctgtgtcggcatgcagacccggttgtggaagataaaattgcagtgatggatggagaacgcggtgaagacagcaaagcgggtatatcacggagtcgaatcggaggtcggagtgcatgtgtgataggcaagattctgatgtctcaaaactcttgacgcgagcgcgggcaattacatttcttcattgggactagtttattaaactattatggagagggcaggagatgcttccagagcttgagcccctccaattttgtaaagcatgggaaaaggtagaattacaagtggctgtgttctaccaaggccctcaaagcgcctctaatctttaatctcatgtacaatatcgcttacggtaaattggcaatgtggtctacgacacatgataatgccgagaatcgaggctaggattataaccagtgatatgattgtgctccccgatatagccctagacatggtgtgccatctcactgcagttgcatatacccctgctatcagctgcaccgaacttcttctggcgacaggtatgtagaaggtcatgtcgactgttggacaattgtaaatagtaacacatagcatacggagtactccgtagtaaatagtcagttggagctacgtagtatacgaggggcagcccctcaggatcagcccctgcatgagtacggagtataggagaacggagtacggagtatggatccccaagtcattgattttgattttcctttgtttggaacaagatcagcgcactaaggagatcagcagctgagttatgaaaaaagggcgagtgcatagaccaagaatgtggaacctgggttctccgtactccatacccaggagaaacagaaaaagagcgttaaattggtaaatttgccggtgggatttgggaaggttttggagtaatccaggcggaggaatgcgattggcccaacctctcgacggagaaccacgttggcttgacctggccgaacctgggcttgaccgctaggcgccgttggttcctccatcaccagatgtgttcaccagtcataagttggacttcagataaggaatgtctccccctgctgcacctggaccttgcgtggcgtcagaaaccaacatatccgaggatggccgcctgcatttatggattgcgcccgatacatatcttttgactttccaatctgattgttgagtcaaagagtcgatgacgaagaataaccgtgaggctgcatcgtgcatcgtgcattagaccttacgtgtctgatagatgttgtgtcaccggaccctggtcaggtctagactggaattgaaagcactgttggaaatcgccctctgaagcaccgcacgaccagctgattccattgcagcctatcgggaaacggcagctctaagtttcaaccttgacgacatttgggtcatagtgtcggaggataatcccaacgatccgtcgagtcctagggccccgccaattagtgctgaccattggatttggggattgcgaccgaggtgaaattctttttctttgtacctccttagatccttcatatccctgtttaatccttgttaattcctgttaatccctgaatcccatcacatttcacatatcagaacaagaacaaaggagaacgcacggggaccagggtgacccggacgtttgcatccgatgctacaccgtaaggagctgatgacatggcgctaaagcaagccaaattgacctggcccgcagctcccgctgcattctttggagctaagaaggggaaccgagcaatcataacccccgagttggaacgtctggaaggatgaaggaagctgggatcggctccgccctcctgtgccccaatagtggaggggtggattcctgggcggtgaaatgggaagttcatcactctgtctagtggatatagaatacgcgccctttcggaagttactgtccttaggccccgttatggacgtattaggcctagttgcactataggaaagtcgatgatatgaggacaaaacatggtactgggccgtctcggatcttgcctggacatgcagggtttggagaatctcgtatttacgactttgtaaaggtacaggctgagtcctgatccctgatatgcctctttgtatgttcaaaggggggtgatcagaccagcattaaagaaatcccaatgtgccgctgttacggtgtgctcagtgcataccatagaggatcggcattttttctcatattgtgtcagcggttccactagaggagaactttgattaagacaaatcagacacatctgcctccaattattcctttgctttctttccttttccgttcccttttttaatgggagtgggtcgaaggtgtatgccgcgtgatgggcttgatgtgttttgcatcgagatcggctcttatttgtatattgtatattaccggatcttattgagctgatttataacatgtgtgttcctctcagaaatcgcaatttaaattgctatctccaaactatatcctgcaatatacttaaattaaagaaaaatagaaaacgccccctgaccagacacccgggcttggaccgggtattgatctgtttttggctttggcagagccctaagcacgatcagatccacctggccacgttgtgaatggctccaactactcctttttctgacacaaactggctttttaacttttctaaaatgctggcttcattcattttacttccacgttagttcacgatgccaagttctaggaattggcgcccatccgagactggacctgcaactgtctgttctacctgccatcccatcttcggaccttggaaactgcaggtgacatgaatgatatgaagactgatcacattctaagtatacatcacgtcactgttggaacacaatcccaactcaaaagtcaagctcaacggggttcaaccgcttgggatagccgagcttcccgctcagagcccaatttgttactaggccgtttttctagattgtctagcaggtacgtatgtacggaagacatatgtactttggtggcgcctgtgatagttttctgtgccacgctcccgatgaaacaggcccacaagcgttgaggaaatcgtccctacactacggatactccgtctgtattaactatattttagttgccccctcttttttttttctcaggtgatactagagagtgacctcaaaatgttgattcggtaaaaatgcaggtagcctaaacctcgcatggtccaagtttccgttttcaattcagccaagccgacctaagtgattggctgtgacctgatgaaagcgcgtcgagtagtctatttccaggctcggaacatttaaatgagaaaagtcaaaaaaagagtcagaagtatccgtaaatgattaacgaatatggtggcaatgatgcatctcctgcatcatgtactccgtagcccgggtagtaagggaagtcagcccatgcagagaaaatagcaacctcgcattcgggtatgcacggtccaaagagagaaacgacggttttgttctttaatctagactttgggaagggcgatgacgataattatctttaactccactttacacccctgtcgaaattcaaaatggcagtgcgtagatctctagcccatcacattgtaacccttgcgtaacgagcccggcaacgctatactggggagaaggagaacaagggaaggaaaggaggacaaggtgtcctgtagatgacttctcatctcgcattcttacaatcagcaagaaagagaaaccgactcagccttgggggaagtattgaccgcagatcgggccggatcgcgggtcaaccattcccagcggctaaagggtcaaggttccctgggaatttgggaatttggattttggatttctgcaatttgctttttcttacacgaaaagggaaaagaaaggaaaaacctcggaaacttaagaaaacgggagcgtctaggctgtgtgagattacttttagcataagataccgtaactatccccactatacacattatacactatattatacctgctctacctagtattcctgcctatcataccgaattataccctattcccccctcttactaggcctctttagcacttaatctatttaatctattccattcttccccatgttcgccgcaaaaagcatgttccatgttcccacaggtccgatcccacccccacttagctattgctgcactccggagtattccctatgggccctggtcgaaacggtggaactgccctgattcatggattcggttccaggttgcccttttgttcctttctgtctaggctcctttcgttagtgtcaacgtcgtgtcatcttagcatgtgcggtggcatcgtagatccgctacggctccctggattcccttataagcctaccttgcctagtaacgggatctgatcttcagaattaaatactctcacccgttcctgaacggagcatcggctctttctctttatcacatccactctccattcaactgcaccccacactacgtaagctatttgctgtctaccacagtgactatatactgacttgatccccctttagtcaacttcctctcttcaagcctttacttctttccagttttttatatggccgattattcctggcaacctcagcctccttcagctggctctcaatggcttccagacgatgcttcatatagccagtccaccatgcaagatctaacttgtgctttccctcgaccgaggcacactcgcgtcatgaagcctcgtagtgcaggcaacagcccttccacagcaaccaggagacgatcaacggtgaatcaaaatgtgatgcatggcctgcccactcaatatcagtcatccctggaagaagcccttctcgcctcagccgcccggaactcacgtccgatgagctggcatccttcatcggcaagaactcgcggcctttccaacccgtacatctcagatttcccttcggatagctatgccggtatggcagccgtgccggatcagtacctcaactcagccgtctacggtggtgaaaacatcatgtcatatcccatggccgacccttcattctcccccgactacttccctgtctacccaacaatgcaggaggatttcccacttccacagcaaacgccggctctcatggccggctcacagattgaccccacaatcggatgggatgtcgccaccatgtccgatatgtcaacgatgccacatctaggctccgataactggagcctggacatgctatcaatgggcaccaacatccccccgccagagacaacctgtccaagctacgtcagcgtcccttccccaggtgaactgagtggcccatcaacaccggactttctcccaatgcaccaattcgacaatcccttccagatcaccgacgagcccaagaagaccggaaagaacgaagaagaactggtcggcatgggcctctacagccagcccaacgggacactggcacgagccccgcagagtaaatcaggcgagggcctcaagctcgaagaaacattcaccccgtccgacgaagacaaggacagcgagacggacgcagaggtcgagatcattggacaccgcgaattgccacagcaaccgcccgcctaccatgaatacgcgtctaccattcgccagtcgaacttttcttccaagcagcccagacaagctctgaacctgctccagaggtcgttcttcttcgaccacgataatacggatcaacagtcgatgactgctgtgcagccttttgttggttttaatcagccctgcatgaattatgggtacgggtggatctaaggggatcctagcggagaaatttttttttctttcttttttttcggcatttctttactgtaccagcggcatagcgtggagtcatctttcatcatcttttttttctcggagtcggatacacggaaaggataccctgggacgagacttgcactagctacaattactttaggtgtactcgtacacaattcgatactgaattcacatcaatatttgctaccactcttcctatttttagtcttgcttaaaaagtactagtagtgttaatcattgtcatcatttcaagttctcgaagtatacaaactcaccctctgattggccgcggagaagataaacctcggcaaaaccatcccaaaggaacaacaattccccgaaaatatttcacaggctatcaacgcaaaaagtcaagcaagctaaagcttacgcatccggagtcgaatttaatttctaatttctcatttcgaacccagcgccgaaaatggcaaaggccattttcacagcttggaaaaccaagtctcagttgttggaagtgcgggatgagttttatcctccgtctgcgtacgctggaccggatttgcgttcccatggctgtgcagtggtatgttacatatatgcataggcgccagaatgagtgcgatgtccgctttgtatgtggttgctaatgatgtccggaatcaaaggtcgaggcttggaagctacgcggcaatgtaccgcaccatgttgaagctacggcgttgttgacagatgctattctgcatgatgatgcacagaggaattccatcttctcgattcgtgctacgtattctgcagctttctgtcggtgagtattgagccgtgcctgattcttgtttttaccttttatgagagagaaaacccagtccgattcccttgggatgatgtcttgaattcagactcctctttcacatacatatatcccgttttcaaataactaacgctccaactcagcttcgtaactggtcttgtggataccaagatccacggcgttcgccgaacaatgttccagcgcgccactgacctaggcctcccagcctccttcgtggaactccgccatgaagcaacccaccgcgagccaccgtcgctcgtcgtactgcgcaaagctgcgcagcgctcgctcgagtggctgtgggacaattactgggccggtgttggtgacgactccggtgcgcctgcattgacccatgaagatggtgcgtctgtcagggccgtcttgtgtgacgctctgcagcctctatccagcggatcggtggatcctgtgtccaagaagcggaaacgggatcaggctatttcggtagctatgcggcttgtctcggtttgtaatgtttcggcgactggggtcaggcatttgccttctgttttgcttgagcggggtttcttgatccctagaggtcgggagtgagtttgatccccccctgtttttgcttttgtctcggctgtgtgtcttcaggggtgcatatgttgtcggggagtacatgctgactgtgacattctagactcggggattcgatgaatgatacattcaaggaatggaacccggttctgcaaaaggtcgcagagattcatcctgcgttcttgagacatttgacggaagatctggtgaatgatctagcctttaaaaacacaaccgatatatcggaagatgcgccttccgaggcactgtatctgtggatcgcgcatatcttgacatctcctgcctgggagttccacaggcaatcatgcccgcagagctatgttctccgagcctgcgatgaaagtccacaccactggacaaatatgttgggagatcagttaagaaagcagactggcaagtccaagtcagttcttaccgctagacccgccaagaatcggatttcaaaacccaaacatgttagaaatgactcgcaatacgctccatcccagctctcggataagctgctggaacatggatggggattcctggagaaatgggacagtcgacctttgggtgtggtatcgagtaattagacgggctttctccaattcactcaatgtatacgctgctggcagcgttagagaaccccaaagccaatatttcccgtacaagatagctcactagtacggagcacggagtaaccaatcaaaagcggtggcattactaaagctgtgaagctatatgggaaaatagttcttccggatgacgttggtaatccgagatccacccggtcatgtatctctttcaagagctccccgcactattttgattcatcgttggtgatgaactttctaaggacacaactatttggaaccaggtcgcctctatttaggtcacaagccagagccatgcatatccaatcaattcctatgtgtatgttgatcttccggtccgtcatatatattaccaatcaacagtggctacttggtagtaatattgcaggaggaatgattgcttattctggattaattttacagggacggggaaaggtaacaactatgcctacctcgtgacggacgaggcgaccaagcagtcggtcattattgatcccgccaatcctccagagtgagttgcatctctataacgggttgaaactacatgagctgaactgattatgtggaactacagggttgcgccagagctcaagtctcaaattgcttctggcaagattgacctgacggccattgttaatactcatcagtatgtgatagaactttcatgggctggtaaaaagaggataaaatccaggtttgctgacatttgctgaagccactgggatcatgctggcggtaacgatgaaattgtatgcatgctttctcgggtcactggttgctatctcgggctaacattcgcaccagttgaaacaattcaagggccttcaagtcattggtggcagagactgcgcgttcgtcaccaagattcccgcgcacggcgaagaattcaagatcggagatcgcatcttagtgaaggcattgcatactccctgtcatacgcaagacagcgtctgctactatatgcaagatggagaccagcgtgttgttttcacgggcgatactctgttcattggcggtatgtgtatcattttcaataattttctgtcgagtgtcatggactaattggaaaccaggatgtggtcggttctttgaaggaaatgcgaaggagatgcacaaggccttgaacgagactctcgcggctctgcctgatgacaccaaggtttatgtagggttgccttttcgtgttgatacaagtctcatactgattcctcctagcccggtcatgagtatacaaaggccaatgtcaagttctgcattgcagtgtcgcagagcgagcctatcaagaagctccaggcatttgcggaccagaacacgcagacacaagggaaattcactatcggcgacgaaaaggtaagagctgaacctaagcgatattctagtcgagactgacaaaaatttagcttcacaatgtgttcatgcgtgtcaatgtaagtttcttatcttttgcccttgtataagccgttgctaattcaaacaacaggaccccgagatccaaaaggcaactggcaagactgatcctgtggaggtgatggcagcattgagagagatgaagaattcgatgtaaagatgatagtaaactagcgagaaaatctacgagatcatatgttgcgatatacttccgtagaaagcgtgagaatgaggtattccgaggcaagccggaactatgcaatccatgactacagacgaaatctccacaaatcaggtcatcaagagatttgtataactccgtagatactccggaaaatgagtgggactgtatacgtcataatcgtgccaagctcccggtccccaaatgtagacataactttcttatctcacgaacgtagccagagaagatgcagggagatgtatgcagtgaaaaataagtcgaatttagtgatctcagtcttccttgagctagtggataaaatttgagcttatgtagatgtagcttttctatagacaagccatagaaaagatacctcatccctgttttgtctgcggcccaccaataccgggagggtggggtataccaccagctatctacctactttctttcatgccacaaacacccttgacatgacacagtgacaaacagaaaattccaggacttctgcaaaacgaacaaggcagctatggatgatgtaagtgctggtggatcggagtgttgcagtgactgaccaatgccatcatagaacgatggaggggcgagtgataccgaagctcagaatcatttggaggtaagcgatttgactcccatcatagtaccatactaagtgcatatcgtcatacaggtcgtgttctatccggactgcagtcaccgtcgcaaatcctcccttgttatgatggacaagccgagggtccgatctcacccagctcaggatgacctgacgaccgcctgctatgttcactccctcattgcgagcgaatggacctcaccaccacaccacctgaaacatacagaagatgcgcaagatctggaagatataacacggacagtggacgaggctcaacccgtgacaaataccaaaggtttcgagccagatgacccggtcccggtgctcgatacggacgagaaagcgatacctacaattctcgaatcccggcatcttacgaaaagacagctatcagatatggcttggaatgtgcgaaagctatccaagaagctgggcagcatcaagctcaggctcaccgtgaaaactgtcttcgtggtcagcaaggcgaaggacgagtcgctggtaagcctgactcgaaagcttacaagatggctactttccaaggaccgcgactccgcgtacgtggtttacgtcgagcggcggctcgagacgcatccggacttcggtgcgttgcaactgatagaagacgagccctccgccgaaggccggctcaggtactgggaccctcagctcgtgcatgacaagccgcatttgtttgattttgtgatcacgctcggtggggatggaaccgtcctatacacgagttggctgtttcaacgcatcgtaccgcccgtactctcctttgcgttgggctcactaggcttcatgaccaatttcgactttgcggattaccagaagagcctcaataatgctttccgggatggcgttttcgtcagcctacggctacggttcgagtgcaccatcatgcgcagcaaagcgcgactaaacgacccacacgggccctctctatcaaaacgtgacctggtagaggagctgatcggggaggaaggggaggatacattgacgcataccccagatcgagtgcatgagattctcaacgacgtagtccttgaccggggaccaaacccaagtatgccttctcctacagtgctatgtgttaggtttcacaacagaaacagacacagctaaccaatctttgctagccatgtctcaaatcgaaatatttggtgacgacgaacatttcaccaccctgcttgctgacggaatgtgcattgctaccccgaccggatcgactgcttacaacctcgccgctggtggctctctttcgcaccctgataaccctgtcatcctcgttaccgctatctgcgcccacacgctatcattccgacctattatcctaccagataccattgtcttgcgcatgggtgtgccgtacgatgcgcgtacgagctcatgggctggctttgatggacgagacaggtgagtttgttctatatgcccttagtttggcacttgggtctgcatctgactgacacaccccagggttgagttacatcccggtgactatcttaccgtatcagcctcgagatatccctttgccaatgtcttacctcccggtgggcagggtgagggctgggtgcatagcatctccaagacgttgaactggaattctcgacaaaagcagaagagcttcaagtagctgaagaggaggacatgcttctttggcctgaccctggctctttcttcctcttcacctcttcttttatgagcgtatttggtgcctgtttagttcgatcacttgtattacagctggtggttcattgttgggcgtacatgctttctagtagaatctatgaaaaacgatatgactggggtgatggagtactagttgttagaaaataagaccaacaagatttttaattcttttagctaataattagctacaattcccagccatttgtttttttctttttttccaagtggacacttttttttttcgactaagaagctgcaggtccacttggccctataaaaaggccatcgcccggcccgaaaattcttctttcttcatcttcctcaaccacctcgctttcagagtcttaatgctggtcttgaactgcgatcttgagcccgacactttcagagtatatgtgaatagaataacatatactctacttgactgacttggtaagtttgcaacttcctttttttcttcctgcactgcattcccccagccaacggccttgcgccgttcgatgatgaaaatcttcctacattcgcagtttccacgctagccgtcgcttgaacccaatcaaggcggcattgagcggaatatcttccttggatgtctgagaactatttggctgttctttttatgaattctttgcatttcaactttgcagtcgagacggttgctaattgtctctcagaaacaggattccttcttggtcaaatctttctatcatcgacatcatacatcgctttgcagtgtgcagtctctagctctgcagctagtctctggacgcggaggtcactgctttgcgcaaatcggcataggatatttggagtgatgtgctgtgtcgagttgaagtcatagcaagaacattcagtatattagtatcaaatgaatggctgtttctacaaatatctcccaattcagatctttttctagtatctcatagccaaacctgtagtttctcagcccagaagtaaaatcttgcaagattgcacccgaaagggttgtgctccgccgtactgtatccacctatcgaccccatacgacctcaaaacctcccataaataactcaacttcaccagatcctcaagctctcaaatccgtattcctcgcctctcaatcaaattgcaacgccattcccatggcagcaccacatcgacatgccacgatgcaatcaatgagcaatggcggcatatcgtcaggtagcgacagaccacagcagcactcacaactatcacaacagtcccctgggctgcgtgtaccttcgaatcgcaagaccatctacgaccgacacctgaaccggactcgtactgcagaactcagtcgggcgagcttcgcctttctattcggggagatggtcacatatgctcaacgacgagtaacaggtatccaagatctggagaaacggtaagagacaaccccctaatccaatgcaatctcctccccagcctaaaacaaatattgccatgtactacccaacaccccatagctaacgacccctcttcccagattaaatgaacaaggctaccccctcggtctccgcctccttgacctcctcttctaccgctcaacctcaacttcctcctccgccctctcaagctcctctacctcctcttcacccccaaaccgacccctccgcatcataaccctgctgcacctgatccacggccccctctggcgcctcctcttcggccgcgccgcagatgccctcgagcactccgtgtccccggacactcccaacgaatacatgatcaccgataacgacccaatggtcaacacatatgtcagcgcgccccgcgatatgagcatgctcaactgcgctgcctatgttgccggcatcatcgagggtgtctgtgacgggtgtggcttcgagacgaaggtctcggcgcataaccagcccacggaactgtggcctagtcggacagtgttcttggttcgctttggggatccggttatggagagggagaaggtgcttgagagggcgggtgtcaaataattcatgggcttgcattcggattaccgggatatatagaaggctacaggctgatcatgtatgcttgttagcatggtagatctacggcgttttgagatgctcgagggtggttatggcgctcttagtctgcggctctttggtaatgtttgattccggcaccggcattcccttcacgaagtcatgcaagtaccagtttcgacggtcgatctgagggatttcttaccggttcttgaaatctgctgtgaagaacaatcatgtacaaaagtccttctcggccagaagatatcatacaatacaattcctccaggagaggacatgttacattacgtacatgtacatacatagaagggtattggcacattggttgctcgaaatgagatgtagaagcagatcccaccatacacattgtgatggactggcgccgtaactccaacctccaagcaggatatcaacatcgtccgttcaccagtctgaatcatcaagaactgtccactcgccgacgtttctcccgatcatcatagggcgatgggctccgcttccgcctctccctagaccggctccgctcgaaccgactcgaatctctatcatcacgtcgctcccgtcgaggcgaacgcgacctcgacctgcgccggggtctaacaacgctagcattagcacccgtcggcccgcgatccccatcatcaccaccgcgacgatcaggcataaaccgctcatccgtaacaccctcagggggcccatccctcctcctcctgttctccaacccatccccaaaccgcccagtatcctcagacttgagatccttatagcgcgtgcggcccttctttccaagcttcgtcatgtcgcgcacatgcatgtactgcggcaacgtatcacgattgacatcatcctcgaagcgcgcgcccataagctcccgccgatccagaccctccgcctcaagatccccacggaagaaagcacccttgtggaaatagcgctgcatgaagcccgtctggccgcgcgtagcatcgcggtcctccttctgcttcgcgatgaactcgctgtcttcgcgctcgcgctcctcggtggtgaggttccgccggcgctcaatctcttcgcgctctttctcgctcgcttcgatcgcttcccgggatcgctgcacgcgcttcagctcgcggagtgtccacgccgcgcgctcagcttccgggtccaggccgtccgtgtcgtcaatggcttcttcgtcttcggcttcgacgagctcgtcgtcgtcccaggcgcggttcgcgcttgagcgcgctatcgcttccttctccagttgatcgcggattaattggtctgctttttcttggcgttgtgcggcgcgttggctttcggcttctgctgctcgttctgcgtctgcttgtgctttcgtctggccggctgataagggtgcggtgttgcgcttatcttttttgatgaatgttggccggatgagcatgcggcgaggtgcttcgtcttcggaactactctcttcttcggagctttcttcctcttcctcttcttcttcctcttcatcgctctccggggtagttttggacacagtaggttttacatcgtcagtcgtaggttgtggtactgcttttggtgcaggcttgggctggtcgtcctcttcttcttcggtgacgaacccttcctcgtcgtcctcttcctcggccttttgggctgctactgcacaggctgggaatgagctcgctttaggcgctttcgctcggcgtagtgcctcagctcgtctgcgacgctcttgttctagtcgttcctcccgctcagcttcatcatcctcttcctcttcttcctcctcagatgagggctcctctgcgacagcctttccaggacggtagcgagtaggcttaacggggtttttggtcattccccggtgggaagatgggaatggaggaggcattgtgatctgatctgatatgtggaaggagggtggatgttgattattattgagatgtagagccccgtttcctagcttgcaatttaacaccagaaaattgcgccaggtttgctccgtaatatggtgtggaggtgatttgttgaactgacgttatcgaggccgaagcttttgctggatatatgtgaccacgtgatgatctgcaggagggcagaagtaggcattcactacattaactcggagattgggttcttatatctgggtagtctttctttctctccgctcaatctagagccaaataacccattaagcctacgtccacgtagtattttcagatatccatctcaaaaagtccaattagccagtttcatactaatttaatcaccacgtgaccacgcgtttccgcgcctcgcgtcgatcagccttacttattccccgccgttttccaacatcaacccgggcaacgaaaaatatcacgctcaacactctcaaattcgaagtctcaaccagagtggaaagcagccaatattcgaaaatgtcactccaaaccccccgcatccttccctctcacctccacgcctttcacccttccagcactagctcgaacaccgttcgcatactcggcaccgtcaccgcgctgcacggtaacacggggacgctcacctgcggaaccaatggtgatgtcacgctgatcttgaagtctgatgcgcgcctgcaagtgggaaagctggttgagattgtggggaaggtggctgatctagagggtggacaggtatgttccacactggctccggagggatatacttaatatctttgattcgggcttctatagctatgtagagtggatgctaatgctttgggtcttgtagggatacggaatccgtgtactgggctcgacggagtggggtgacccagctgattgcggtatgttgtcgaatgcctccctctgcgaggtaatttgggctagagactgacttgtgtgtttgtcatgaatctagattataagatttacgagaatgttgtcaatgcgacacataagttcaagagtatcttctacgactaatgggtcatgagttgatggacttgaatacatggccgtttttctgaggggtttgtcccgggtgtggtataaggctggaatataccaagagcacaagccagcctaattgttgtgacattgtcagtgccctccattagagcctagggagcagatatctgtttgaccgggcccgggatgtcgatgctgtcactgtgattctccctctgtgattccccggcttttgcattttacgtatgagattatgatcaaagcttctcccaataaaaattctacattgagctttacttataagaattgagggtggttggaatgtagttggtgctgtgactgcctaggtggctagccgtacaagtcttcggctacggagatttacacccctcatgtattccgtgggactcgtcaagtggcaagtttgaaaggtatcatgtcgtgttgggaccatctgcgaggacctcttgaaactgctatattggattcagaagaatctatcgccttaaggtgagatctctgaatggatgcattaatatctccctagagatgtctactttatatccaggcacacacagcttattactctagcctaggtaaacaactcaaagccacgcgtcttcggctacggagatttacacccctcatgtattccgtgggacttgtcaagtggcaatgagagccacgacttcaggaacgtccacgagaaagcccagtttgttgtttgatgcagacctacatggacctcatacatatggtaatgttatggtccctgtggtaggtgaagcagcatgtgctacgggtccctctgcctacactgtctcatggtgctacggtgagatggtggtcagagggatgagaggaggaagagagaagaagaggagaagaggagaaagtgtagggggagctcttttatattgtcacatcccacgtgcctgcctaaaatcgacggccctttgctcttgccattgttccctctcggttattggttgtcgcaggtgactatacggaaccctaggttacatatagacactgggttgctcttgccttctttacctctcgggcagggtcactggattcaaccggtgcctaggtaaatcattttgttaaagcaatctacctacaaggcagggcatgattattgtgatttgatttgatttgattccgtacttcgtactatcataagagctacataaaaagggtatccctgacaaagaccaccacttccacccaccaggcacagcgaatacagcatcggagtcctgtcaagatactccaggtcatcagtttgaacaaataagaaaaggtcataagtctcaaggtgcaagtcaggaaccgttggctgtatgcaacgagatctacccataaaccgaacgccatcgctaaaagacaacaaaaaaacaaataaaagaataaaaaagtaaacatgatcgggttgatatgtggcaaaacattcataaagttactcccggtctaagacaaagaaggtggctattgcccttcggtgtctgcaccagcgggctggctcttgggtgcgtcggtggtagcgagagcatccgaactgaagaaccccgagtcgggaacgataacatcgttgaagttgaagggaaggagatcggggttgaagttgtctttctcgttgtggtggtccgagaatagagcgttgagcagctcgttggcaggagtttcgcaagatccagcaggggaggcgtagtccgttggaagccactccgcccagttgtcaccagcgaatttggtgttctccagttcgaagaaagcttcggccttggcagcatcatcgaaaatgtcgagaaccatgccatcaaggggctcaaaggtctccggaagactgtcgtttgcaagctgtggtgccaaaggctgttgcttggccggggacttctgttgccgtggaggtgactgaggacttccgtgaagtgattggatacgctgcaggcgctctgccgacagtcgcgctggagacataatggagcctagatccttacgtttgttgaggctaggggagtttgcgggcaaagacaaacgcttgtcaatcgcgttgatccgcgggttccgtcgacggggagtagggcttgctgaatcgaatccgatggagggactttcaaatagatcatcgaggccatcactcggggtgggtgcaaggttctccttctgctgattcggcttgtcatcctttgtggaggcaatgcgagggctgcgacgtggagagcagctgttcaccatagaagaatcaagctccttcaaagggccttcattctgaggattattgaaaagtgaccttctcaaaggcttgggggtgagactgttggcatctgtcactggagcagagcgggcgtgcatacggctcattgggctagacttgatggcgcgtgacaatacctctctagcgtcctccttggaccaacggcgtcctggggtatcaaacggcacttccaactcaggatcaggactaatagatcgagaagactcgttgggagaataatctgcctcaccgtcctgatcatcgtcgtcgtcattttccatgtggggggtctccccatcgggatggatggaagacgcttcagtaggtgctggggaggaagcggaagacttctttggtgcggccttgctccgagttctggcagcagggcaggacttggcctggccgtctgcgcggttcctcgaaggacgctttttgttgttctttttggtggccggcttcgctgcccctggcttggtccatttgtcttccgggcgcatttgtttgaatttgtggagccacaaaccacaaggattgcagaaagtcatctgatcccaatcattatcgtcctgctcgagagcctttttgtaaattttgaagcttttcacttcacccttgtcgtttcggtccacgggatcccaatagagcatgggagaagacctcatcatatcctccgcaagactctctccgccattcaccgttttcacccaggctcgccgccagctggcggtttcgatggagccgcaattctcgcaatagggcggaatcagcccgttgagaatcgcattgtccaagcgtgcctttatattctttggcaccgccttagtcacctgcttcggcattgactttggcttcgaggattgtttcgactgcttgggattagaaccagctgtctcacacggcatgaaagtgacatccacaggcccagtaggccgaggaggaacaatggggtcactagccgggattgcacgaaacatttggggaacttcgtggaagatatgtggtgccggcgcgagtggttttagcgccaagcgttgtccaccagaactcgaagaaggcctcgatgcggggcgggactgagcggggcgagaagggggagcacgagataccgaacgcggtgcttgctttgcaatctgctccgttgagttatcatcgacggggagatgatccttattggtcccttgtgcggcactgacaatgctgactggagagcatggctgcacagtagaacggacagagcacttgtctcgagttatcccacgagacacttccgttctaggatcgcctaggggaataaccgagtcatcgtctatggtctcgtccggccctgcgctcatgaagccggagtcgttctccagagacatggtaggcaacacagggcttgatctatttggtaaccggctatcgaacactggaggagatgatggaatgttggaggatggctcgaagagaccttggtaacgagtatcctcgggagaggggccgccagcgtctgtggtagggatgtcatcgctcatgcagtacggagaactgtacgaagcgggacatgaggcaatgctaatgctcgacgactcccgcaacaagctagccgtgggtcggcttcggcgggggaaatcagacggccgagatatgggggtgggtggacggacgggctcttcgtgtgaatggtcgacggtgagagcggggtttacaggagttgggcggtggattcgtacagaggccgccgtgctggctgcaactcgaagcgaacttggctgtctttcgatgttcatacccgactttccgggccagcttgcttgatacaccttggccctcttccgggcgggggcctccgttgattcctcatcagcactgccgtaccctgactgaatggaccctcttcgggtgttgttttgtgagacgtgtgaaagctgggtctggttgtcgcagtctcgcatggaggcacttgaggatgggcgaatcatatcgctatggggaatgctctgcttggggtaggattgctgatgagctggtgttcgacatccaccaggtgttgacacccgactgccagcgtatgagtgtgaaggcgacaccgagcggaccgatccattgtggtggaatgtagcgaactctcgtggtgtggagccttcgctcaagagctggtggaatctctcaatcccagattgatggatcggggatccgatgttgtcgttctggctctggcttcttgaggattccaggagggcggggttttggcgaataaaatttgtccatgattgcgtgtcaaagtcgcctgaattgccattggtcaacttccgatgcttctgcatgctggctaagtactcactctgggtgacagttgggacaggcaccagccgtagcttgacctccaacgtctcttgggcacctttggagaagagaccactgagggggctcttgcaaactcggccagtaattatggtcttcgactggttgttgggtgtctcagtcgccgatgagaaggtggccagcaccccagaaagcatgccttgcccgacaagaggggtttcgaattcggaatagtcgtaggcatagacggtataatcctttcctaattgacccacaagctccgggctgaacgaggaactgtgtaagtatgccattttggtcatccggggaagaggaagtcaaacctagcagaaacgattgcctggatgcatatttttaactcgatcactccaaccggagtgttctcgtctagaaatgccgtttggatgtcaagcacgtgtggccaccgagcaaggcaattagttttattctcgttgtcgaatgtgtaaagaactttcactgtatgatgaccatgtttagctgccattcatcgccctcattatatcggtaatggaaaacatacgcctcatagggcggacatcgataccgtcctgagattccatctcatcagcctttgtctgtccaccatgcaagacggtggatcaaattctggggttgaaatgaatggtagaggctgaagggtattcaagtatggtcgaagtaagagactcgaggttcgaagatgttgacaggtagaaagaggggggagcggagcgaaattgtcgatcaaagaaagaaagccctttcactcaggatcgggaatgagtcggcaattattagcgagccagccgatcagcggtgcatatctaggatctcgtcgaccgggagaatggcaggttatgcaggagtatgtagtggcggggtctttttatctgcaggcctggaattttagcaattgtgaatcccctcgcagagggaacataggcatggaaaagcaaaaagcaattcttaccaattaaacagggaaaaaagagcaataatctctccactagctctgcatgagcagacaaaagtggaagagagacgagtgaggaaggggtgaggttaaggagccttgcatgcgcgggtcaagctatcacgaaagatctccaaacaagcgtgacgcgacgtgactgcggccaatcgcgacctcgggaaatggccggaagttggtgcctaaggcctgaggcgcctaatattttcctcaggcgcttgtgagaagcttcacgtgacctctgctctccgccaaccatcaagatgtctgaacctacagcatcttctgaatcgactgcatcttctgcatctcctgcatctcctgcatcaaccgcaccttctgattcaactgcatctcttgataccagcaatctttctgagcccaccatgtcgactgctcctgaagtccagattcagtatgcttccctatcaataactcttagctccattcagaaccaatcatctaacaagccgactagggaccttctgaacaagccgagaagcgagctcacgtaagtccactctttacaattgatttatccccttcccttcctatgcgacctttctcatcctgagttatcaatggtctcttgatcgggagtttctgattctcgagcttgtggggttcgcctacgacgcccgcgtctcggaaactttgcgaccgacttcttcacatcctcatgcaagctgcgcaaagtacatacagcacataaaactaactttacatcttgcattttaatagtgaatatgaggtctctctcgtcgagtcgcatgagctcagcgccggccccctgtcgctcctgctgaccgccacgcgcacccacacccaggtcctgatctcctgccgcaacaaccgcaagctgctggcgcgtgtcaaggcttttgatcgccacttcaacatggttctcgagaacgtcaaggagatgtggaccgagtaccccaagggtgtcaagggcaagggcgtgaacaaggaccgcttcatcagcaagatgtacgtgaaccaaccgtggacggatcttcgtccctctttgctatccttgaaacagtttctaaccttattgccttatctttaggttccttcgtggcgactccgtcatcctggtcctgctcagctaaacgcctaatgcctcacgttgacatgatccctgctacttgcacggcatctcgaacccatgaacattttccatgggcaagttatcatgtaatcgatctcgataccctttgttctttcttttttccctcgcgtgcttttcctcccttgcttctagtccccgccaagacacgattggctaaggggatggactaaaaagacctttcggcgttaagttctttgcacgggctcctacccgttgcttttttttcaaagggaatcctcgggcggcgtcaaattagggcagagctggttagcaatgaatcttacagaaagatcttatggatactacctttgtagatgcttgtaagctagtaggtcaccttcatccatagatagatcttgctttttgtacttcctcgagctcgtcagagatgtctcatcccttggacattattaagggttggattgttataccttattcttcgccatgtacaactacaagcactcaatgtatcaaccaaataagaatatcattatcatcaatgaccatatctatcaagagacaatcatgaacagagagaactcggggccggatatgccgctatgtatacgaagaaaccacctagagaaccaaatcctaaacagcctcagcaagccccgtcaaaaactgcgacaacccaaaagcgccaggatccggaatcttcccaagccactcctcctccccaccaacataaacactcctcccaagactcgccttcatatccttcgtagactcagtcccctgccgcgccgcctccgcagcaaccctcacatccccactctcaagcaacgaatccacaaacggcgatagcgcatcaataagcgtccgatcaccaggcttagcaggcgtgtatttccccagtgccgcaaacgaagacttcagcgccttcgcccacgtctccgtcgtgatcgccgtcggcgaggtggtgttctgcgccagtaagctgtgtgcgagcgcgttcaggaagatcgcgtagatcgcgccggatgtcccgtccatgacattctccacgacgatcacgatccgcgcgacggtgctgacaatgtcggtggttagtggtggggaggcgtcggcgaggaaggattggattgcttcggcgccgcgctttagtccgacgccgcagtcgccgtcgccgacgattgtgtcgtaccgtgttacttcgggttcggcgtcgatcacacgctgcaggccggcgccgaggattttttggagtatggttggatcgactgaggttgtttgggttagatttgtgttaagatggtgggtgtgatggaaaagcttacgctgtaggttgctgtggatgtcttcggtaagattggaggtcttcagatccacgggggccgcgttacggttgttttcccacgtagaggcactgatcggggcagaccagccgactgcctcggcgggggcgtcaagaagctcaagcatagtagttttcacgcccaggcctgggtcgacgagcttcatcagcgagatgctgaagccgaggccgttcagactggttaggaaagtgccctggatcacgcggaccatgttgacctggtagtcgtgctggagctggcggtagacttcatctgtgataccggccagctcgagcgggctaacaccgccgagattgttgattagcagcacgaattgatcctccggcttgcgggtcacgtagcagcggtctgggtcgttgtggtcgagtagctgtagaagcataccgcggactagctcgacgaggtcgaatttcacgcggtgcgagcccggctcgttgtggattcccatgccgacttcaacctcgccgtgcgggatcgtgtcttcgggtacaccacggcctggcacgtggacgtgttcgagtgatgatcctagtgagactagatttgcgttggctagctgggctagagcatagaggtcgtctagggagccactgatgaaggtatgttagcattgattcgatttctgtaaagtatagcatgtagaccatgatatgtatagactcacccagcctcagccaatgcaccaaccatcttcaaaatcaatacaccaccaccaataccgcgacgaccaaccttcccacccttctcgcgaccaacgccaacatcatcattgatagcaaagaattcagtcttgataccagcaacacgggacttctccgtggccataccgaagttcagcacatcgccggtatagttcataggaatgatcagcacgccattatcagtggggacacgatcgataaccgctctgcggatctgctcggccgacggcgaggcaaagatggtaccggcgaccgaggcatcgcagagcccgtggccgacgaagcctgcaaatgcgggttcatggccggaaccgccacccgtcacgatggagaccttgtttgctctgcggggcgcatctggacggcggaatatgatcttgtgctgttggtccagggccagagatgggtttgtgagtgtaagcgagttaagcgcagtgagaaccaggtggtctgggtcggcgaagaaatgtttggctgggaaacggtcagatatgtggggaagatctgggggatcagaggtggagcgtactctgcattgctgatcaaaagtggacagtttcgattgggtataatttgaattgaagagctgacggagtttgaggttttgagtattttaagagagtggtataatgtttctcgagtgtaatccaaggggaacttgtttgccactggggtatgaggcaagattccaagattccaagattctcaaagctaacaccagcgagaagctctcggattggatttgaggatctttgatggggaaaaagtgggttcggtcactgggatcttcaagactcagggtaacttgtatagccaagtatgttgtatatatactgttgagactcacgttgtacggaatatagtcggaagtgtgggagtacaggcactccctccctctttaaggaacccgagcatgtccattcatacaatcaaggacgtgttcctttctttttcccttttttttccagctcacatgaacatccaaggtctgatctgcgcttcggcttaccctctagggatatcccgccaggcaccgcattccagaaaggcgtcttctgtcgtccgaatgggcgttttcaccagagaacattcttggaatggacaattcgatgcatccagagctgtgcaatgtattctagtccactctcgcccgagtggactttcttggacctcaacctggtaagtatgccggcattcctggtgcaccgaccacctcttacttgcttgtatgagttatagatattgtagatgtattctggtatagttattgtagcctataggctttggtctcggctttgatagagaggtccctcttaatacctgcaatagtatctcaggccaatgccaatgtaaatacaaattgccactaggacgaataccgggataccgcaagtcttagtggagacatcatgagactaacgtacaaaagggacagccgaactcggatctgctgtcagatccaggactgtggggtatatgtatagctctaggtcatggggtggtcctttgctcgttgatctcgcagggttatgcttctccaatggggttcgtggatattagaagcattcggatactatacatccactatcattagtattccaactacctcggtgaatatgtatagcacggatttcctctttggtctacccccacaacacgaattctttaattaagggccatcggcactggccgagatcaagtattgtaagtggcttggtgagaccggagttactccgtttttctccaaaggtataatcaattgccggatcccccatactaaataatagtctccctaaataatcaaacatataccaaacactccgtacaaatgtgtgcattcagtgaataaagtacctactctcaacatgtaaaagattatgccttatgacacgtagctgtattgattagtgccttctttgcgctcgagatactccttctcgatcaacctaaaagtcaaaacaatgttagacacaataaccgggaacaacgggttgttagtaaggaggatacgcacttctcaatctctcccttaatatcggccggctgaagcacaccccgggtcttagtagcactgataacctccgcgatcagctcggcgtggctgagggtcttgcggcccttcataatgcgcacgatggcagcttgcgtctcgaaatggcggtcggcagcaacccgctcgtgcgtcgtcttggtttcctctttggtctccttcagctggatctggttgatcttgatgcgcatttgcttgtcgctgaaattcgcgttgtacgagaatttatcgctagagttcacctctttgcccttagggtccttggataagactcggtacttggcgcatgcgagagactggagcgttcgtttcaattccgggtccgctgtgtgtcatgttagggattgttcaacttttagagcgctgtggatccacttacacaatccggtcgcttcttggatctgggggtactgcatgctctcgccattggggatatcgttaaagagcagcaacacaatcgcctggaacgagctgactaccaggttcttctttccgagcgggaagtttgcagtcagctgacaatgcgccagttgatgtttccaggtgagcttgcgtcctgtatgtttgttgtggtagaacgtctcgaatctgctaatggagcgtgcgatcgtcgatggaatccgtacgggtacatcgggatatgtcggccaggaggcggcagagagcacgctaacttcgaattcgaatcggctcctgcgctcgtcctgctgtgaccgtctgaaggccgtcatttcatcgttagcagtgtccatatcgttgaacatggactcaaggttatgagtgaaatttgacccgcattctaaccaaacattagccaaagcgcataacatatggatcttggatgcgacaaaccgttcttcaaacgagttaacatgctcttttccgcatcgttgctcgcgcttcgtttcatcaaaagacgccgggcaagatcgttcttgtaaaaggcttcaaagacagcctttccatgtacgaatcggaagaggtcgagaacttgatcaagctgtcggtcaagctctgcatcatcggacatcaggcttacttcctctgggttacggcctggtggcagcttgtaaccgcccttaaggagcctatccacgtatttggcgatcatttcacccgacttgggattgtcggtaccacctgtagagtccatcttcttcccgtggttcataaaggtaccaaaggcgtcgcggaccgtgtggcccagttcctcattcgactcaaaagaatcggtgcaaatatcgtcaaccttttgcttaaattggagcaggtgaatgaccatgtcggcctccagatcttgattaaacacgatgccctcaccctcctcgatgatgtacttcctaaatgcaggcttcaattcgagactaagatctcgccggtcaagcaaaccgtatagttgcttcaaggcagtcttattgccggctcgcatcaagccaagcacttcgttttcgttggtcaacacgtccgttcgccgtgtcactagagtctcatccaggagattggacagtttgagcttcgtgcttcgattgaaagagaagagaccacaccgttctacctcacgttcgatcaactggtgggaattatcgacgtatgcagccagggaccctgctgcttgttgttgagaccactgcttcacaaactcctcggacttggccatgaataaaggctcaaagtcactcccatacacatcgaggctgtggaaaagctcaatagcatctctaagcaaacttgaatctgtcaatgcctttgtaaatccacctcgatcggcctcgatcaaatcatatgctcctttcacaatctttggcttcagactcgcatcagagaagatgtatgaccggaactgaatcaatcccatttcacgaatcaccggttgttctttagaatgcaagaggaacgactggtcgagataatagaagatccagcgaatagtaacctgggggagagagaccgttagctgtgaacctccattcgagatatttccttgccacacatactagcttggagtgccaggccgaccacgcctcaatcactatccgcaatgtaccgacatcagtgctacctccagctctggcgacaagattcgtgcgcattttcccgctgacgaactctttgcaccgatcctgaagcttcttagccaacaaagctgcccgctcctggcggcagacattctccccgcccttgtatagctcttctagcgagctctctggtttcctgtcatcaaaaatagccgttagagccgcatccaactgcgaccacactttatcgaaatacgattcctggttaagccgcggtccggtacgaaggttcttgacgacgagctttttcgcgccgctatgaggagaaaatgtgttttggcggatattagtattcaagccatgggatctgatgggaccatttaacccagagactccccgacctggcacgccattcttaggcggggaaccggaaatcggatgcatcttatgcgggctcgtttgggttgaggagcgtgagggagacgacgacagacgggaacgcttgtgggtttgcagatcaaggctgcggtcgggtgaatacctctgggagaggagctcggatatggattgttgcgatcgcggctgcgacggctctccttgatcagaaagcttcctcttgccgattgattggcgcttaccgctctgctcggtgtcgcctctcgagttctgcggcatctacccggttcagcccgactgggaatttggggcactctcaacaggctggagatgatgaacaggaaggaaagtggattcgggatgatgttgaggggaattgacgttgcgcttggctttggctccgcacggcgataagatacggagctattccatcagacatggacatcatcatcatggatgaaatcatttcggtgtatatataatgtactaacggatattcaaataaagagccaggtattattgataatctaggtgtgcgaaatacgatatggacatcataacactcgcctcagccattcaggtgtccgtataagaggccatagctacacgactacttatgtacgtatgtatcaaaagcgctaatgatcataaattcacgctgaaaagaagagagagttgtatctagcgcgggtttttaaaagagagaacaggcccaaggccctcgccaacactcactctcactacagcatactactacggaatacgaagtacgaacagggttagtcctcaccgcttgttgatcattgagcattcgcccaagagctgggcatatatacggggtattatatatatatatatatatccctaagttttgaattcattcctcgactctaggaataagtctatgagaagtagatacaatacaacgcacattgaaggccatttatgtatgtaattcatggtacgcattcaagtaatgcaacgctgacaagtacacgatcatcaatgcaatgtccacatgttgttgatgaggctttatcttttgcaaaagactgcgagtgtgtgcaatggaaccataaagaagacgtaaactcataaaaataatcaagaaagaccaatcaatcaacacgcggaggacttctcgatttctttcccataggactgccgcttgttctagaatccaatattagcttcttgcttctactgcattgtgcagctaggtaaccaagggtgacatacgatcgtcggcgctcgccttccttccggaacccttcaatgatcttggccatctctttgcgagacgcattggcatcgatcttccgtcctccgagactcatactcaccttctcatgtgcgctcgccataagcaaccgcttcatgagaagataccgcatgttcatacacacgtacacgccgcagtcgctgccgccgtcttgctggggcgaatcgttcagatgcaggaacctaatgggcatgtttaggaggtatccgaatttgcgagtcaccgtgtctgcctcccagacgtttccttggtatagcgagtcgtagtgaaatgcgatgcggtcgacgaccgagatcaacaggagggaccagtgcgtgcctccttctgcctgggagacgttacgacagtcgttgatgggaaggaagacatgggttgctcgagtgaagtccgggagtgcttcgcggagggtgcgtggatcgggggtttggaggatcatgaatgacatgctggggcggagaaggatgatattggaggattggtatcgtgaaagaaattcatgttcgagatatctagagcaggaaggtcgaggatcagtgccatagtactgtgaagtatgtcggaccgactctagggacttactcctcccagaatgagatgatctatgacacattagctcatgtcccagctagaaggattctctcgccattcaaacccacgttgtctgtgagccagtcattcttgagagtttgcatgtcctctcttgtcactgtttcttcgttaactacctagtccttttcgcgcttcggggattgattccatacatcgcacgtcgtaatctatgagcacccaaaggcgacctgtaagcatcccgtttgctattcaccaaggcggcaagatctgttctaaacttacaactcaaaaatgcatcatctgggttcaactgcgcaagtcagtaatcgtgccgctaataccgaatcaagcgaaacccaccttatcgccaaaccggccgcgcaccttgcgcaacatgacggcaatatgatatgtgcctttcagttgatcacaaaaccgaagtcaggccgctagaatatgaattccttgaaagccgcgggaagagaagctatacactgcgccacagtcgagaacgcaatacgtgcacggtgctaggctcctcagatagccaagccagaccccacaaatcgcggttatgataaacggggcagatctttgcgcaggatttgagagttcgggtgccccgcgcgcacaggaaatgagatgcaacctacaacctcgtttatgcagtggcaagcaaagccggatgcgaaatagacgtcggcaatgttcaagtaacagactcgaatgtgtcccccgtttctgcactggcggagtagaagtgggaccggtcggcaactcgggattgggcggcgcttcggagagggaggccgtcagccttatgcttatgggtggcggagaaggaaggcggaggatggattgaatgcttgaatgctaatgctattttcaattgcgcttatggacaatagctggtcgagtggtacagagtatgctgaggggtacgccaaggctgagagtaagtaagtcaggcagtggccatgcaagggaaggttagactgaggctgtgattttcctttggaatgatgcaatctcggacgcaggaacaggagggaggtagcgatgaaaacacaagagggacaaatccccaaaagaactggactcaggcaggtttgatcgggctgcgtcacatgtggggtcacatgatgggtatactaaatcaggacttatgttaggaagcattgcgaggtagaaatgtatgatttagataagtctgcaggatttattaaagaaattaattcataagaataaggggtatctaaacgtgcatcccagagctccagtagaagaagaggttcagaccatgagctgagatgagaggaagggaacagagatcgcataaaagtggaaaaacagagagcagatcgaagagatggaaacaaggccaaagcaattgggatggacagaaaagaaaaaccataaatcatcagtatgagatgacgccgaacgaaacaaaagcagatcaaagtgacaaagcagcaacattgcaactggtgtagtcgcctttgttttgccctgttcttcaaagggtatgattttgaagaaatatgaagacagattagaaaaagaaacattcaatatgatcctgtaatatcctgtagttagtatgaaaccgtgtattgtgtgtttttcttcttgcggatttgaaaaatgattggcgaatagatcgaaaagatggcgtgagattgttgattcaggtgctgagtcgggcaaaatgtttgttccaaatccagccaacggtcctagtggcatcgtcctgattgcgggcaagccaaagctcacccttctcgcctatgacgtcgaagatatccccggaggcgtaggtcagatagggatatccgccctcagtgcgagtgtcaatgtcaaagtcataaacactcgccgcgcagaacaacgccgcagggcctatgggaggggcgctgcgttccgggtgcccatttacagcagtatcacccggcacatccgacatgggcatggcggacgagaagaatcctgagtatcgatcagtcggggaggctggcaggtagctcgagtgcgaagagctattgatcacatcctcgaggaaaggtgtgtctaggctgagtcttggcagtctagggaaaggctcgatgtcgctggttctcttaagggcgggagcgctggtgacttgttgcagcagttgattggaagtgtctgggatgactcggctagatagaatggaattggctcggtaacggctgctgcggctggagtggctttccatctggggagactggtatgattggctgccgatgctgaaatcccgggaaacgttcggtgaatcatcggtcatagacccaggtcgcgtcttcgagctgttcaccgtagaaggacgacgaggcgacatagaattatgctggtcaccgggtgacagggggaccaaattgagggaatgagccatcatcgccccgttgcaacaacttagctcccccactcgtgcctccatcaaagtgtggtcactattgaagtcgctgatgagcctgtcaaggtcattggggaacaattccacatgagcaccaatctttttctgtagaacactgtaccacacagtttgaatttcgataaagttcttcagacacgctgccatcagtttggaagtcaacgcgtagagtttaggcaattcatcctttaaggtatcattcaaagccaggaactgctcgccctgctcgacggtcttcttgtcaggtttgtcgccacggtccttgatggctttgtagcgtgcatattccgggagtcgcttgtcgcgcttccgcatgacccgctggggtgcattgtaaagtcctagtagttcaaccatcggatcaatgaccgttttgcggacgacagcaagctgcaataattagtgttgattcaataaagaaacatgacataacttacatgttctgggagagcagtcgtcacaagctcctgaactgtcatcttgaactgatgccacttgctctccaattgtggatacggagaaggcgacatgccgatgatctcttcgatcgaatcggcgtactcgttgaactggttcacatagagttgcacatcccgagagtagctctcagcgtcacgcatgacaacctgcaactggaaatagccgtcgctaagtttctgcgctagcaaatcataggttttgtcttcaaacaagtcggagaggccaacttgctgtctaaacttctccgtgcggcgaccaaaggctttagacagaccggtacgcacatcagagtggttgcgctttcggccgacagcttgaccaacgaggtctactcgtttcttcaattcgttgatccgatgagaaacattcgtgacctcttccagagcattggaaattgccgcatggtccgggtgatcttttggcgtggactccaacaggtcgcggagaataagggggtacttcaagattctttgcaccggcttaacgagcaaagagtccaaatcccaggcggtcgtgagatccatagcacccttctggcattcgctcagccaaaagcccacctttggaatgcgctgcacgacctgaagtttcttgtttgcggcatcatggtttttcaggtaatcagtgtacaccttttccatctgcgtcatgtgggcgacaaaaatctgaccaacaaaggtcgcgcgatccttttcgagttccgacattcctgctgcttcggcgccttctggggcaatggactcggcagcctgattgttgcgctttcgcttgctggtccatctcagagcctttggtatgacgtagatactttgagctgcttgtttgagatcagacaagaacttgtcggagaaggccgcgacttggtcggaattgccgaagagaaccttgacatcctcgggatccaataccgtgagcgaggtcctcttgtagatgtcctcaatgattatcatatcatgaccaaaggtgtgctccgtatcaacaagttctttgattatgtgacgtcgcttcttgagacgtcgctgttccggagaaggcgaatccttcggctcaacccgaatggtttgctcggtggatggaacaagtgaagtagcggaggagtcagcggcctcgggagactgaatagactccaaagttcggaaagaagagtcatggctgctgcccgggctatgtcccgcggctctaggagcagcctgggtactgcgactgagtccaatgtggctcgatgaattaagcgaattttgacctccaagaggttcattatcagtagagtgcatcgttgagggcgagaggaatcccgaagtaaatgcatgaggcagagtctggtcgttggaagcttgagcatcaaccgagactcccaggccattgtttttgttggatgcgccagcatcttggtttgccgaaggcactaggcggggggtgagtaccccttcagtgcgcatgccatcggtttcggtgtcgggggttacagcatcatcttcggctgcgatctgcatccagtccatgatggacggagacgcatgttcccaatcatcacgtccaaccaaactagctgtgtgtgagagtgtctctgagtcatggaaatctttgaaccccggcacgactaccggatcctcagttaggctatcgggtcgcccatctgcacgtgtatctgcaggatgagatcgaggctcggacgaggggtaaactgctgggccaaggtggtgactcctgcctcgcgtcaactcctccagatagagctgagtggcacgcttcgaatcccatctgcccaatctagctaagcttggtggatcagaaaaggcattggatcgaaactgttcagatccttgaagtgtgctcggacccattacgccgtgatcctgaattgaagctggtgattcatcgtctaccattgaagctggccttgttgaaacagccgaacaagtttcagttggtggttccgtttcacggcctcgtagcagagaatcatcaccactctcgtcacaatgctcgtcacaggtggaatcttggtgttgcccagatgaccaggaactcatactccatcggttgtgaagatcagtttcattttgagcctggtgcattgacgcacgctcaggctcttgagtatcattactactagaggaattgtagtaaggcgtatctccaagcataatctggatggactctctgtcgtcattctctgaaagactgcaatcaggttcgtcgcatgagtcgtcgctccggttggacccgcggatttgcattatatgatccagaagagtttgagaaacgctgggattgcgctgcagcagcccggactggggctccggatcaaaagtagtgacatgggtatcaccagagtctgatgtggcacccgaatctgtcgggtcatcaacggtaggctgtccttcacctgaagttgttgaatctacaccctgtgggaggccaagagtgggagagtccatcgttgtgtggggcgctgccgtatccgatgccggcagggcagtgttgaggtgcagcctaggaacggcttgaaccccattttcgtcatactcaaccgagccggtcgagtctttaaccatcgtagccatctcgtcggatgacggggcgtggatcacaggcgggttaggggtaattgtaggttcatccatcgattgcttgagatcttcattcgtctcctgttctcgcaccgaagcgtgacgtcgaagctttccagcagttgatttgttcggtcctctgtcattctgattctcttgaacatccgagtgtcggtagagtgcctgttgaatgtgccggcgacgagcatcaaaatcaaccttgaccaattcaggtaatttgcgttcaggacgagaccgcgagttgttgtaagtagcgtgtttttgtaaattcaaaactctatccccgattttggagcgtggggagaccgcagcaccatgtgagacgggttgtcgaggtcgtgaactgcgcaacggaggcgactttttaggtggcggctcagcgatgtaagcttcaagtcgccgactggattcagataactgattgcgtgttcggccgattgttagatcccgcctaccacgcgggttcgtcgcgaacgaagcgggatcatctgctggtatgcggggagaactttgtttaggtgacggaataggaaggcggctgccgcccctgggcggcgaggtaatggcagcggatcggctgctgaatgttggattggaggatggggataagctttcggaaccggaagtgacgaaacggtgcgagcagacaggaatgcgcgacttggaatttggactgcccgggggcgacccatggccgggtttagtctgccgcaagggcgcaggtaccgccatttcaggattccacggatctgcaaggggctctcttgttctatccaaatcacttaggactcggcgatgtttgccggtgctatttatcccggcctggactgcctccaaagaagttgtgtgtccaagataccatgcagtgggcgtgagtggtgattttgcaggatattgatcgagacgctcacggaaggctgggttcgggcttggaatacttccatccgacccacggcgttgttgtaaacgcgatatggcaccgttgttaacctgtgtgttgataggcgacagttcaccaaacaatggccggcgagtatgcgattctgtaatccgttgaaacagagggggtggaatagcactatttgtatctagggccggaccgattctgtctatctctggcgacgacgggttcgaatccgctggcgctcgagaattgctggtgatcgactccggtagcgaatcacgatactgacgacgccgtggcaacacccgatttcgctctccgtcaacacttccggaaggactcggtgctcttgaggttggacgcgaaacagatggcaaagggaggacctgatccgtggttttgttgaacttgttgacaagatctttgaacgacggctgtcgtgaccttgggttcacatgcaacgggggtatgttgaccgagggagctcctagcgttggcgaatccgaggttgaacggtatggttgacgtctagtgcgcgatgactccaacatggttgttggcaggggtgatactttgtcatcgactgaaggatagtcggccgcggccatgcccattcttacatcaccaaacccctctcttacattggatgaagtgcctggcagggatccacgctggcgataataatcagcggggtctggagactcccgtcctctacaatcttgcaattgatcgcccgacgagaggtgattcgcggaagtagaggaattatggggtcgtatgaagcccgacgatagtggagcatacgtggtcgatggttgtgcctggggagagaaggagacggtcggcgagtcacctaaagaagtggtagtgtgaccattggcagattggccaaatgccggagccgacaattgtcgcccaaacggaggtgggtggcgataccggacatcaaaaccctgctcgtcaccgccagacatcttgcatgcttcaggccgacaggtcgacgtggactggtcgcggcctttcggttctgggcgggttgcgttggtgcgttgttccgggatggtcgcccaacgggaatgtcgcaggtgagtcgattcaggctacaaagcaatcctcctgggtggcgcacacccattcagcattcatatttgagacaactcgccaaacaaaaaaaattcgatatcgaggggatatttccccggtcaaagctcgaaaggtaagattgttggatggagttcgaatcggggggatcggggaagagtagagtggtgagatcgaggatcggccagttgccgaaattaaactgtcgtgagagagagaacggataggaggatcgagctccagacggatgttttgtttaccagccgtggctgctgataggtgttggaacctggtagttgaggggtttcaaagcgaatcctgactgtgggccagattgctagctctccgggccaatccgtgttgacaggctgacctgcactagtgacaaagaggtgttgaagttacagtgtcgatctttgaacaatattttgtgatgggtggaaagaaagaattgtgacgagttcgaggaagaagactcgaggaagagggaagaaatcaatcgggactagtggatgatatgtttaaagtgaaactgaatttgggagtggatttggcggatgtggtggatttctttgtctttgttcattgttcagctggatgttgtactgtacgtggaggaatcctatatatcatttcctcggcttgtaccttttctatacatcgcaaatacctcgactacacatccatcacaccagcaataccgcaactgacaggcgtatacctccgtattgtacctcgacatcccccaggaacaagattaatctcccggagacccccatggatgacgcagtggagacgcaatggccagccctggagtatctagaccgccccgttccatggttcgctccgatgtttaattggtagctttgattggttcctgatttcctgatttcacttacttttccacggaagtctcttattgtatgttgacatctatatacttcggagacttcagagacttcaacggctcatccatggttcaagattactgatactaggaaggtgtcgagttcgagagcattcgcgtatccgaactttgtttgccgcgcacacttgacgcgtcgcgcgaacccatcaaaacttatgttgtatacgcaatgaaccaaactcacagggatccgaaaaaggaattacacatttaacctgagaatcgcctctcatgggcaaaaagaggaaaagacccatcaaggaccgcgggtccacgtcctcgtctcacacgggtatcaccacgtctccccgccgtttcaggcctccccatgcgccaattcccctgggaacaaaaacaagccatcccgttatctcgctgtactaccgaaatgtcgtacccttgcgggagtacctgctccataaacttcccgtgacctccaagtcgcgtcggcgccgcatcctgacattgggctcgcgggaagaccaagggaccaatgcacaacttcaaacgtctgagacattggcggagctgctagactccacactggtgggtgtgctgaaggaatcgtctccgacccttaattacgaacgacaaaagcaatactcctcttttaatgagtctcaatcgcggtcaattctcgtcagcaccgataccgggccgacttgtccccaatcggaggtgagcccatgacggccgaatcatttacaggtgtcagattgctgatccttgtcgcaggtggttgactttgtgatctggaaaatcttcaatcgtagcaatggctactctaaagaggccaagcatctgctgacgcatggcttcaaacgcatgtctatgcaccatgctcaacacactggtattccaggcatcgtgtctcagtttccgaatcagaatgttcaggttctcaagaagggtgcatgggcagaggtcctgggcttgcttggtagtaatggggaggagattatgatgcagctcctttttgattgcggagtttttgccccgatcgacgctgaaaatggcatctactaccaacttagcggtatgattcggtcaagatgtagggagagagttgatcccggtttgctgatatttttataggtatcccactctcggatctcgagcctttgagcgacgcatctgcggaagccaacggctctactgccacagcacaagactcaatgcctaccgctggtcaaagacatcccaaagagaaagctgaatacaaacagagttccgagatgctccaaagcccaaacaacattgtgtttatgcggcgacgtatcctctatgggcgtgtcgagtctaaaaagggagtagcctctggactaggacagaaacgtacgtgcttcgccgtttgaataatggattttaggtttatgctaattcccattagatgttcttggccgcttctcaacgcttgattcgatggcgcaaacagtccatgttatgaagtacatatttccccgtcaattcggcctgctgaatgtatttacgctggactcggatcaacgcaagcagatgaatgactcgaatggtttcatgtctcgtgagagtgagatatctcttttggaagaacagaaacgaccacaggggcctcagactgggagtgaatcagcagatgcaggttgtggtggcgtgaaaagtgtcaaggtacctaagaggcttcgtggaattactatagagcttgtccggaagctccggaaccgcaacgcacaatgctcctacggagagttgctgcgatactattgtccaaccgaagtgagacacttttgttcacattggctaggattgtgtagctgacctttggcagcaaaccgaacccagactccttggcgcatctgtctccacaactgatgctaaaaaaagcgagcctatctcctctctcgagtcaaattttgtaacacaggtgaactacccgtcgccaagtgatagttcgcagacctcatgtgatggcgcgagatcagagccgcacatagctgtcgacacatcttgtggaaacgatgccgagaaaccggtgatccgaaagactcaagtcagtctaactgatcatgcgactccgccatcttctgtctcggcattttgtcgagcggtaatccagaaattgatcccacggcagttttggggggttggtccagatggtatttcgaacttcaagctggttctcaggcatgttgaccgatttatcaaattgcgccgattcgaaagtctaagtctgcacgaagtctgcaaaggtgtcaaggttggtcattgcttgcactgaactgatcgtctgagacaaagccgtactgatccgcacgctagataacaagcattccttggctggcgccaccccaggtccagactagtctgccatctgagacaagatcgaagatcgccctgtctgacttgcacaaacgcaccgagctactccatgaattcatgttttggattttcgattcactccttattcctctcattcgttcgcatttctatgtcaccgagtctcaagtgcaccgaaaccgccttttctatttccgccatgatgtgtggcagcagttgacccagcaacctttcggtgacttgaaggcaatgatgttcgaggagcttgagtcagatcaagcccaacgtgtgctggcgcggcggtcctttggtttcggtgctctccgtttgcttcccaagtctacaggcatccggcccatcttgaaccttcgcaaacgagatttgaagacacggtcatgggggaaacgggaaacgtaccttggcatcagcatcaattcaagtattacgcctatttataacatgttgacctatgagcgtgagcaagctcctgccaaattgggctcgtcgatactctccgttgcagatatgcaccgccgattgaaggcgtacaaagaacaattgtcccaacgactgccctcggcttctagaccttggcaatccaagctcccaccgatgtactttgtcaaggttgatatcaaagcttgttttgatactatcccccagaaaaagctgcttaatcttatcgaagagctggtctctgaagagagctactgcatcgcaaagcacaccgagatccacccgcccacttctactgcgaaacaaggaaagcccatacgaaggtttctgagtcgcgctactcctgctatgaaaccgcaacacctaccagactacgtcaatagcgaaagcacgacccgaaaggccaacaccgtttttgttgagtgtggtcaaaaagaaaatgatgctgatagtcttctggaacttctcagtgaacatgtccagaacaacctcgtgaagataggcaagagatttttccgccaacgcaacggcattcctcaaggctccgtgctatcaagcctcctttgcaatttcttctatgccgagcttgagcgaaaggtactgaatttcatcaaacccgaggattctcttctcctgcgactcgtggacgatttccttctggtcaccccggatgtagctgtggcaatgcagtttctggaagtaatgatcaggggccaaccatcgtacggtgtacaggtcaatccagcgaaaagcatggccaatttcagcgcagcggttgacgggattttacttcccagattagagggaagcacattatttccgtattgcggtagtctcatcgacactcacacgctggaatttcaccgcgatcaagaccgcatccttcagggcggcgagtcggctgctgctactctctccgatgccttgaccgttgaagccgcccgcctacccggccgtacctttcaccgcaaaatgctctcctcattccgtctgcagctatattccatgtacattgatgacggacacaattcgcgcgcagttgtgctagccaacctctactgcagcttcatcactgctgccatgaggatgtaccgctatatgaagtcgcttcggggtcgtgcgcatcccggccctgccatcataacacagactatccgcgatctgattcggcagacgaaccgttatatccaggcccggcgtgctggtaattcggagtccccattctcgtgtttcgttcagcgatcccatttacagtatctggcttctgcggcatttcggtttgttttgaagcgcaagcaaacacggtatgcggtggtgctgcgctggctagactcgctgagtaaagattctcgacccacatcagattccgaggcttcgagaatagcacaggtagtgaagaagggaaatgccatgttcgaggaatggcggttctagaatagttagtgccggaatgtctgcaaatcaagtaataatcggtgtaattgtacgatcaattgccctcgactagtataattgcacaattgtacgctcatctccctggggccaattaaatagtgcatacagtgccacaatctattcagcccgccagcatcattgggcacaaatccggctaaatccgattgaaacagatcagggttcaggggttcaaatcaagatatctttgatctgtgttcagggactttcaaggctatgtaggttatcccttcccatctgggtagagatcagtttccatctaccgtctaccacatacaacatagaatgtgttgaatactttatcgctacttcttaatagcccctttttaccctagtgaaacaaggtagcgccgaggtacccccctgttctcagccagaccgagtgcggcataacggcctgaggctctccgcttgcaatcttgagcatcacggtttcttcttctcactctcttttggattctcactgtcttcgtctctcgtttgaatcttttacttcttttctgcttacttccacccccacactcttttcctactgttttttgcttaccctctacaacccccctggccctcaatggtcaccccgtaatcttctctcctgatccctctttacacgactacacctgatctggatctcatcaggctgcggctgtgcctgcaattcatttctacattaattgacttctattgcggtattattctttcctgtctggaaacgcctgaccattctcattcaaaaacaccgatcttcacgtccgttgttgaccccttccggacatccgccaatttcctcccaccctgtgtactttttcaggtcgatcataattgcggggatcaatacatctgaataattacatgagatcatgaccaccgttttcccgacacccaattcgccccccgagctctccgggtccaaatcctccaaatcctcctcgtttcattcctcctcccacctggacggtgcggagagtatctttacggacatctcgaattttgaagacattggcttggaagatgataccgatttgacatacgccgatcctcgaggctcctacgcccgctctggggtgatggcacggtcgcccgccgccagaatatcaagcaaagtccctgcggcctcaactcgcgacttgaccgcggtccccaagcctcgcaagcgaagccccctgcccccgctccacagcggatcgaccaatgtgtcggcaggctccctcactgcgagaactgcagcccgaaaggatccaggcaacacattgcattcacccggtttgacaccatcgcaagctcgccggtcacggtctgtctcaccactacggccgacatccagtcgctccgcctcgagcaccagcctgggtctctctccgctatctgcacgagtgcccatccagaaacaaacttggcaaccgaatcgcaagtcggtcaaagatttggaggaagaataccatgactcggacgatgaactaccggacgatgcaagtctgtggaacatccctatttctccgcgcccagttcaggatcgggctccatcacggtctgccagtccaaatgggcgcagccccgggcggcgaccactgcctatccagcacgtcatacccgggagcgataagcaagcgtccgaaaatacggccagggcatcccgcatgaagcgtataccccgatcgagctccgcaggaccggagcgtggacaactgtcgccacgcaaccctcgtacctactcatataacagtttcctatctgacttgtcggaggaagctaagatcatcactgaagctctggagctgcatgctgatgatagagatcgcaagcgggaggagcatattcaaaccggtgctctgcggaagtccagcgaggactcgcatcgcgcatctcgtgatgctgtcgctttaccgcctctgcagaaatcaaatatcatgatcgatccgctgccaattagcaaggagaaagaaagggtcctcacgcggacacgccccagctggcttccgcctaaggaccagaaggaggagagaaaacatctaaagcagtatcagcaaatgatggcccagtctcgagaaattggtatgtgcaagacaagatccgtaaagtattgtcgggcttctaattggtatttcagagaaacgcaaagctgccagggaggcaaatgcacagtgtgaaaaggataacactcgagctacactgcagaacatctgggatgaatatgtgtatccgaattgggaccgcgctctccgcgagccccgaattcgcgagttatggtggcgcggaattccgcctcgcaaccggggcaccatatggaaacgagccattggcaacgaactagcattaaccgaggaaaccttcactaaagcgttgctccgagcaaaggatctccaaggcaagaaagatgtagaaagcgagaacagcaaacgactactggactgctttgaggcaatcgaaacggacgtgcccaaggccttcccagatatgaacctcttccaaggatgcggtccactacggcaaaccctcattgacgtcctgcaagcatactgcatgtaccgcagcgacgtaggatatatccacggtctgcacaccatcgccgccctcctcgtcttgcaattccccacccccgcttccgccttccttgccatggccaacgccctcaaccgtcctttgcccgtcgcgttcctcacttgggaccgcggcgccatggcccggtcctacactctagcctcagacaccttgcgctacaagttcacccgtctacacactcacctgaccgacaccctcaacctttccgaggcagagatttgggagcccatattccgctcgctgctgacaaacggccttgacctcgagcgcatctcccgcgtctgggactgctgggtcttcgagggtgatcgcattatgatccgctccgccgtcgccattctgggctgtctccaatcgcaactgttctccttccaccagagtgatgagcagtcccgtctagctgtgcgcgacgtgttgggctggggtccccgcagtcatggagccaacacccagaaacccaaagagcggcatagcgcccctgccgcagctggctttggcggtgggcagatcgagaaccccggcattgccgattattgggttcttggtgcttcgggcgacgaggatgacttcatgaatgccgtccgcgaggctggaaaggtgcgccagccaattcaataggcttggatataatacgtgccttcgcaatatgtgtgctctggtctgtcaggttctcacctttacttcagcctttcgttcttcttcgttttcctttttcctccttaccgtaccctcatcattccagatagcgcatagaatggcatcacagcctggccaacgtgtctgcttgccttcctatctactatctacccgtatacacatgtcactcgttgcacagccgttttgtctattctatgtatcttgaactgactgcatgagaaccactcgtttctttcttctcgttatattttttgtttttctttccacccaggaaccccaatattcttagctcattgattggtctttttcacttcttcctggttttcccactacttctccatcttgtatttttagccaccccgactttcatgccttgatgcatcgctgtttttcatcgttgatacgtacttgttagtggtattacaagcaattcaggtcttttgcagtcattccactatgttcactgagaaatatactgcattgcatagctggggagcatggttggtattggaggaactgactgataaatgtttcttaaggaacccccatcatgcagagccagcagcaagaacatatcccccatcaataacaacagtctgcccattaaaatactgattacaaaccgcaaaaagcacagcaccagccatatcctcatctctcccaggcctagcaacaggaactttcacccgatacttctcatccggaataaaactcttctgcttctcatcactctccccagtagtcatctcactaggaaaaggccccggcgcaatattattaaccctaacccgcagcttcgacgaactaacctgctgcgcaagcaacttggtcaaatgaatcgccgccgccttggaagcattatacgcaaaatggtgctgcgccatcttcacaatcccagacatggaagtcgtgttgagcacagtgctagaccaaccatctccaacctccgatccgcgctgcagcagcggcaggaacgccgttgtcatgaagaagatatgtgagacattctcgcggaagacctcgtcccactcgtcgaacgtcgcagccgggtcatcgaacagagtttcgcggagctcggatgcatctttgcgctcagtgtcttgcgtctggctggatattccggcgttgttcattaggattgagaggtagccttcgcgcgtggagatctccgagactagtcttctgatctcgtctttttcggttacgtcggcggcgagcgggattattttgccgcttatgttgttgccgtagagagaggctacgcgctcgagtttgtttgcggtgcgtccggttatgtatactttggcgccgttcacggctaaggcttgcgctgccattaggcctattcctgagccgccgcctgtgattagggccactgaggttgttagaacagggttgttgcactggggtttatatattgctcacctttgtctttcacgttgaacagcttttctagcttgaggctttggttgctttcactggctgctattttggtcttgtctgaaacgggggcttttctagtggaatttattccaaattgacgagatggtaggagagaacatagcttgggtcggattaatagaattgaccttcgaattgtttgttttttgctgaggactgttgtgtataatcgcggcatggctgtatatatagacgaggtaaaatgggggcaagtctttaggacaaagctcgaacctcttctagtcatacttcgcatgttgcggccatgaatcaattgtaggtcggcagttgcttcaatcaactatcttgtcagcatccaatccctacatacgaagtgtatcagaatgacgtcacttaaattatgtgaacagagcagaaagactcaaacggacagcaagcacagaaaaagcagagtaataaagaaaatgaaaccaactgccatgtaagaggtatcttactaattattgtagaagtgactttggttacatttttgagaatcctcatgctggaaatatatttactacctgagataacaggcaatatttagcatggcctgcgtggccttcatcagaatcctatcatctgtcatacattcacagcttggcctttacagccaacgcctcgctgaccggcgccacctcaaccatcatcttaccggtgttggcaccagcatagaggtcaatgagaccttgaggcgcagcctccaagccaccaggcacaatgtactctttgcgcttgagcttaccctcggacaaccaagtcccgagatccttgagtgcagccgggaattgcttcgcatgatcgaagacaatgaaacccttcagggtgatccgttgcgactgtcatcaattagccgaagtccccataaaagacacacccaaaaccaagagaactcacaatcacactcataaaactggccggaccctgcggcttagcagcattatactgactgatagcgccacagatagcaaagcgcgagccagtagccgctctcgccaagcaagcatcgaggatatcaccgccggtattatcaaagaagacatcaatatactcaggcgtagcgatcttaagctgctgcctccaatccgcatccttataattgaccgcagcatcgaaaccaagctccttgaccaagaaatcacacttctccttagtccccgccaaccccacaacacgcttggcgcccttgatgcgcgcaatctggccagccaccatgcccgtcgcgcccgcagcaccggacacaacaaccgtgtcccccttcttcacctgcgcgatctcgatcatgccaaagtatgccgtcagcccggtcatgccaagcacggacatcgcgtctgtgggccgtccgcctgccggaacgtgtatcttttccgcctctttcgcgccgaccacggcatactcctgccagccggagccggcgacgacccagtcgcccttgctatacttggacgtcagaccgctgccgacgatgaggacctgagcgatgctctggccgcgcatcacggcgccttgctcgacgggggcaatgtaggagcgcttggcggtgagccattggcgcatggccgggtcgagagagaggtagtgcacgcggacgagcagcttgtctgtaggtacatccttggggatggggatggtgtttagacggaaggtgccattgctgagagaggggtcgatggccggcgcgggaggcttgctgtagatgatttgtttgttggacattttgaaggatgcttgaggggattctgagtgaagagagaacgttcgttgtcgaaaaggaagaggagaaggtggaaatatctacaacatatgtaggatcggagacactccagattaggaaaactgctccttgggcctcggcttgtccccgggccaaagtcgaagtgttgaataatcagcttcttgcagatgcattatttttttactaggacacaataggatgtctatgtcatccatcccagaagggccctcaatgaccgcaacaagatatttatatatctcgaacgggtgatctagggtctgcactcatcctgacgtcattgacaaagaagtataaaagcaggaactgcaagactacgaggactgccacattcttctaataacaccgagacaagaaaaataaatacaatctccatattcaatcatgtcgcaaccaccctaccaaggctatgaacacgccgacccaatccatactgcccgcggcgaagtgggtggcggctcctcaactggcgcccaaggcatcccaacaggcctccacgacacacgatccgattacgatgaatccaagggctacaactctgccacaggagccagttactcgcgagcatcggcaggaggaccgacccagacccaccagcgaccgctctcaccgtcgcctcgcagcgatgaccggattgtaggggatgcgccgctcccgtacacggccagtacagcgcagcgcgcggaaatgggtgatcgttcggctcatgggactcatgggtctcatggacggtctggtgagaagttcggggaaagagtgaaggaagctttcgcgtcggttcatgtaagttggaatctttctgctcttgggaaatgagaaactgaatttgctatagggcgctggagaatcattgcgtggaaacttgaccaccgctgttgatcgggcttttgggtctgaggatggtgctgagcggaatcaagagattgcgaatagaggcgaggaggagtttcggactggtcagtttgtggggcacagggaccatagaacataatgtgtgatattgggaatgtaattaggaatctgggatattaaataagaacatagctattgaatatgtatgttatgccgtcgaaggttagggcccggatccaacgccgatcatacatcatggtagaaggagatcgatacgatatactccataaacctgtatccatcagccaagcatctcccctttgctaagacattcttaaaagttcttaaacgttcttagaattttttaacttttatacaacgtaagttccagagaccatccgaccgacccgagaaggctgtgctggtggaacccacctgtttccggttatgaacgcactcgacacaacattcttccttcaagtatattctacaaaggcattcctataatcctttactccgcattttgatcctggcccacatttgtgcatatagccaatgccaggtttggagacagttgcacactcgtacgacctcatgctttgaaactggttgataagctttctttctcggcatatatcgtcatggtctcaatttccgccgaccaaccggcgtcggaaagcgctgcgacggccgccccaacaaactcgcaccaacaggcattgtactcctcggagacggcatcctcgaatctgctcgggtcagactctccctcccaatattcgtccttctccagctccgatagcgacgaaccactgagcgacgaacccatcccgcactcgaccgaggtcaccgatgaagatgccgccggcgacgtggtgggggttagcatcggacgcgagcagagccgcatgaaggcccgagcaacccccgtggaagagaagaatcgcgtgctggaacaccagggatcatatttttcgactataccggatactataggcgaggatggtctgtttgcgtcggaactcacggccgagcctgaaacggtggagcccaaggttgaaaaagcaccagcaccaaaaccaaaacgagcaccaacatcggcaccaagaccagcaacgggcggggagaggcgcgaacataaacctaggccgtcatactcctccgcacagtatgatgagcctgaaccaggcaagcttgcgcatggccctcgcagcgatctatttgcctcggctcatgagaaaaccgggtcgaaagatgcagccgggagccagcggtctggttttgtcggggccttgttgaagaattcattacctcgccggccacgtgcctggtccaacgagttgaagaaattcctacctgacctgacctctttgaggaaacggccttctctcgcgttccgtgcccacaatggccaaaatcgaattcgcagccagacggtagcccctgcagctaaaaaacccttgagccagccgaaaagaacatcatcgctggtcctgcacccgcaacggtcacctcttgcaccgagcggttcaagcatcgaggatgaaggagaagccgctcagtcgatacctgagctgcgctcgccagatgggacctcggccgcgaaacattcctttacacggcggcctagttcagtcatgcccggtcgaccgccaagtttgcggaggtcctcgtcggatcaatcgctgtatctgcgtgcgtcttccacggcatcgtcccttgaacagcgaccattatacgagaatgtacattctcaggtaaatagccggttcaaggcaatcaaagatagtttccaagactcgagtaataggctgctcagcatgccgaatctccatctgcaggatatccgcaatgagtggggtcaattcctgccagagcttggaaacggtaacaacaacggtgctagtagtacttccaaagaggaacaatcaccgcgggctgaaagcccaccgccaactccgcggcataatcctaactcatcacatccagtcttggaagaagcaatggaagagctcacgggcgatgttgtgatcctaggaggttaccggggatcaattttgcggtctgctaagccaccccatcgtcaactttgggtgccgatgaaggttggtctgaatctgcgcaaagtggacttggaggtcggcctgaaaccggaggacgaggaacacatggaggagaccatcattccatccggggttctgtcccacgtgggcccggtggacgtctgtcgacgattgatgaagcggttacgcaggagcgagaatgcccagcgtggtgaaatgcgcgtccacgattatggatatgactggcgtctaagccccgagctgctctcgcgcaggctcatcgccttcctagagagcctgccatgcaatcaggagccttcgccgggggagccccgacgcggcgctatcgtcatcgcgcacagcctaggcggtctcatcacccgacacgcggtcaacgagcgaccagatctcttcgccggagtcgtatacgcaggcgtaccacagcactgcgtgaacatcctcggaccactccgcaatggcgacgacgtcctcatcagctcccgcgtgctaacagcccaagtaaacttcaccttccgcacaagtttcgccctcctccccgaagacgggcactgtttcatcgacaaacaaagcaaaaaggaattccgcatcgacttcttcaacgctcaaacctgggaagattaccgtctctctccttgcatggctccagctctccccgtacccccaacacccaccaccctcggcttcaaagacatccccataatcggcaagcgcttctccatgggtcctcgcgatgactccgacgaatccatcacccaagacccacaccatgtcacacaagacggacaccactctactgccgcagtagataaagacgtctccgcccgtaacaacaactcaccacacagcgcggccgcatacgccgcatacgcatctgaaaaagcccacgacccagccgacggcttagtcggaccaggcgcacacccgcgcagcagcaccaccacaacctccaaaatcgccacgacgtgcaccatcccgcacgccgccgcgagggagtacctagagcgcacgctggcagagacaaagcggttcaaggagaacctggcgttccggccgacactccactcggagaacaggtacccgcctgccgctgtgctgtacggcaagacgctgccgactgtgtacggagcgcgagtcgtgtcgcgtgagactatcaagcaggtcgatgcgtacgatgatcttgcgtttgcggctggtgatggtgtttgtcttgcttcggctgctatgttgccgcctggatataggattattaaagatggtctggtgaagagtgaacggggccatgttggattacttggtgatcttgagggcgttgggcagtgtctcaaggctattcatcggggtaggaaggagggagttggattgggggagaagaacatataagggttcgatgtgcgttcgtgttattttctggtgttggtctttttcttgatgatctttgatgataccattgccatatgtttgatgatttgggttatgttttttttttctgtttgtggatatggtatatttagatgtgactgtgtcatattgcattgagtctggcatattggcgtttctatagcaggggaggatgagactatttacatagaaatagaaagatagagaagaaagttggagcagagctcaatatacggatatggatagatcttgcacacacgctatgtaaccctatgccattctatgcatgtactttttgtcctcgtccaataccaattggaatagagaccgtctatcaagacaacagaagaaaaggaaacagtatcccggaattccatcacagtatatgaaagcatcacagtatatgaaagtaaaaaaaagatcatgaagaaggatgctataaaaacccaacaaaaagaaaacaaagtatcatcaagtctttaatccgtgcgcgagttggcaatgttcatgaccaagatatcactcgcgccgaccttaatcagctcatccattaccgtggcaatgtgcttcttctccaccatggagctgacagcaacccagccctcctcctcgagcgcggtgatagtaggcgcacgcttgccgggggtgatcttggacgcgattgccagctgctcacgcgggatgttgtattggcacaggacgaacttctgggcggtgatgacaccacgcagacgggagctgagtatagtgagcatttcggagttggtcttgcgggacttgaccagcacagcggtgctggagacaacagtgtcaattgccttcaggccagcggccttcatagtctcaccagactctgaacagatttgagtgttagcaacgggttccggttccctgttccgtattccacaggacagtatttcagtagactggcatatcacaacataccaacaagatcaacaataccatccgcaacgccgagagcgcaggcagcctcaacactaccgccaacatacttgatattcgtggagagtttctggccaacttcggcgccctcgaggttacggaagaaagattcagtgagggcagtgaagctggtcacgacgttgcggccaacgagatccttggcctctttgatatcgcccttctcaggcacctgcacttgcagcttgcaggcgccgaagcccaggtcgaggatctcctcgacgttggaggcctcgccggtgggcagggtggcatcgtgctcggcgacctggtcgcggccggtgattcccaaatcaacgcggccttcgccgacgaatgtcgggatatcggcagcgggcaggaagatcagcgcgatgggcaaattcttgaccagtgcgatatcgaggcgggtttcgcggcggaactggacgtcacagccggcgaggaggtcgagggttgcttgttgcagacgtccttctgtatagtggagtttgcgccgtcagtcttggtttctttgtgtttgtttcttgttcatgtgggtatcgctgctcgcatctatgagtcacgatttgggagagcacttgcttttgggcacggcgaagaggagacggccttcgaggctgtttagaatcgttatattagcagaaatccccatgcggtttgtaattgaaattgactcactggttgacgagatccatggtgatagagcggtgcggcgcggggctttctacagattttcggtggggggaataaggtgatcggggatcgattgacgaagtagtcaagtcaattgcaattcagagaccgtgaatataactcaaagacaagatagaacgattgatatagtccggaggagtcggggagagagaccggagcttcttgcggcagaaattggaggggcagattacaccggtgggttagttacgggaccgggggagtatgtaccgtgttcgctgcgcagtacgagcccacgtgatgggattctgtggtgtatggctatttgaagtgtctataggatatacatggtagagtctagaatgagtttctaatcgattgaataggataattggctgtacaggccgaagttgtctaaaagtggtgctgaacgatatcggagtccgaagaaaatatgttctgcctgaatatgcctgacccatcaggtgtcaattccatccgctgactcatccactgcctgacggctcaggtgtccagccctgagccctcgcgtaatttgcacgaacccacacaggccaaattccactttacactctcttacctacagtccaaccaattccaaccctcgagctcaacgccctctccttccctccaagatggattccagcaagcagcccgttaagctcgtcaaggtgacccgtgtcctcggccgcaccggtatgtgctttcccagcatttttgaagctccaaacccataattcgatattcgatattcgcggggtgcaaccattgcgccccggatcgcccgaaacaaaccgatgaaaaccagacacttggaggaatagcaatcgctaattttggtctatttaggatcccgtggtggtgtcacccaggtccgcgtcgagttcatggacgacacctcgcgttccatcatccgtaacgtcaagggcccaggtacgcgatattgatttctttgcatctgtcttttgggatcacaagaggagggagaaagaaacatggggtctatcgattcattctgtggaaagagccccatgttgaaatatggaattttgaagatcgacccaaaagacaagaaaaactttgccgaaccgcatcgctaacatattcctccgcaccagtccgcgttgacgacatcctctgcttgctcgagtccgagcgcgaggcccgccgtctccgttaaaattcaccaaaacgaaatttcgcttgcttcgtctattttgtctctcttcttctctcgcatatcccttacgaccggtttttcatgattactcttcggccaaaatcgagtcccccgcttttctttcttgccgtaccttcaacctcctatcctcagccctaaaccgccgcgctgcccaatcatccccacctgccgactctcaaggggccgtttctacgatttccgacgtttcgactggaggtgacagtttgggtggattgacttttggtttttttattttaaacgaaagtcccggaaggtcgattatggagaaacgatcgtgagagagaggagcagagagcgcaaaaaagataatagaaagcctttttttttattgatacgagaaaacgaaatcaggttcttgcgcgagggctggtttgtggacttgtggcacggtctggtctggtttcgatcttggtgttttactacatacacacgtccatttaggcgtgattgcatgggctcaatgcgacaaacgaggttgttatgttgtttcctctcttctcttcctcgtaccagcttcccccattactggtacttagaaaagaaaacgccgactcgaaccaggccccgatcgacaaaaagaacaatggaatccaaaaaaagtttgaaaatttccggttcagccttgtcgaggtcgaggtctgaaagcgttcgtagaatctgccagtgtagtcttgtgagtttctagtctaccaagtacattggtgtagacggtagctgtgctatgtcaaaccttcgtcccttctaaattggaaggtctgtatctgatgcgttttgtcgcctttttgtctttctagatataaaaccgagaagtgggaaggacataaagacacaaggccgcataagccaataatgtgatatttggcttttgctataaagcttcaacaaatgccatacttattctactatattctactaatgtatattactccatcacagacaatcgcaagattcgttctccgacatacatggtcctagtgagctacagctgctccgcactggccatgagcctactaagaaggccgtcatcagcagactctccgtcgagaccactctcatcaaggacccgaccaaccgcccccagaagcccagccaaccgcttccgccggatagattcctctagctcagcactcttctgacgggcgacgtcaataacatcggagggcaagttcgccagacgcgcaacattcaacccgtaactgcggtgcgcaactccctcagtaacctcgtagaggaacgtaatctccccatcgccgtccttgtccttgctacccgtctccgtgaaccgcatatggacattacggagagcatgatccgggaaggaatgcaccatgcgcgagagatgctggtaatgcgtgatgaaaagggtgagtgattggatcgagcgcaccatatagtcaagcaccgcctgcgcgatagcgacaccgtcgtgcgtcgatgtgccgcggcccagctcgtcgaggataaccaaggatcgaggcgttgcttgcttgaggatatctgctgtttcggagagttcgaccatgaaggttgattcgccagccagcatgttgtcgaaggcgcccatgcgcgtaaagaccgcatccaggagaccgagtcgggcggaagcggctgggacgtaggatccgatctggcccatgattgcgaccagtgctacctgtcgcacgtagctggatttaccgcccatgttcgggccggtgacgaggagggcgcgcgtgccgtcgtgcgatagatttgtgtcattgggtacgtatgtgtctgtgaggagttgctcgaccattgggtgtcggccctgctcgatgtggaggcctgcttcttctgtgtattctggcttgacatagcccggttgctgggctatgtctgcaagtgataataagcagtcgagtgtcgcgagggattgtatagaatcccggaaggactgatactgtgctgcgatatcagccaggagggttttgtatgcctggtcgcaggctgctgctagggcctccttgtactgatcacgctcgcggatgagctggatgacttctggcgtgtggaagcgagacactctttttgtgccgctgactttgacccacgatgcgggcacgcgcttgagtgccggggagttgttttcgatctcgatcaagtactcaatgccggatactgtggagtattcgactttgcctcttccaattgttgacgctgcctctttgcgatgttctaacaatccgtgttcagtgcttccaatttggagcttaagttcgccgatctcctctgtctcctccgcttcgcgaaagaaggtatatttgtcattggttcgtgcagcgtgcatgttgatcttatctagatacttgacgactgacgctcggatcgtaggcagagaggcgatggcctcacccactagcgatgattggaaccccgtctgggcaggtgatttgatatctgcaaactccattgcaatcatctgcatagcttgcaatacagtgagaagttcgggtcgctcacacttggctcaacattagtatagatgtggtcatcattgcagaagtgttacctacctttccatagtaaatccggattaaactcttctcaagatcactcttgactttgcgtagcaaccctcgtactctctccaccggaaccgctcgcgcaggatcaataagctcctcgacagcattcgtccgctcctcgaggcgcactttgtctagcaaaggtcttccaacccattgccgcagcatgcgttgtccgaatcgcgtttgcgtccgatctaaggtccagaataaactaccctttgtcgagtgatccgtctggttttggtaaatttctagactgaccagcgtgtttccgttcagaagcatatgcgaacgagccgagaagggctggaaatattttgtgaggtcaaacacatgttccagcccatactcggtcatatgttcgatcatagcagacagacagatagtcacctgctccgggagactaaggacgttttgaagcaacttcgcagcttgggtatcctcctcggtactggtagccttcatctttcctgcataaaactcagatacatggctatgtgcctcggcggcggaggttttcttcttctgggcccgttcgaggcgcacggcgtccccaaagacattcatcttgcttccagataaatgctgcacgagtttttcgctagctcgggacatctctccaacaatcaagatctcacagggggcgatgtgtaatagtcgtgtctcgatctcgctccgcatgaagccatcctcaaagtcatcgtagataacgtcacccgtagccggctggacagcgacaatccccacatgaactcgttcgtcgttccccgggcccttggcattggtctccgtcatacagagcatgtacccagtggcaggagaggcacctcccgctgccggtgcagggccctgcagaccttcggcgtcatcaatataggttcctttcgtgtagaggttggttaatttgcgaacaaatggcgcattgcgattatcacccgcagccttgagcgcagcggtctcgatctgtcgcaccacgccgaccttgtggccggctgtaacgagtcgcttcacatgcacgtgtagtcggtgcaccgggatactagccgatgcaaaccggccaatgtgtgcctcggatggatctgcggtaggtcccaacattagtatgctttcggcaataatagagaagatacttacgttcgtcgaatctgaacttcccggggatgcacacgattcccagctccttggccgcaatgcgcgcatcctccccaaagaagcggaacttgtatcccacttcaatgaccagcactgtgttcatgttctgacgcttgatctcaatgacctgtttctccatgggtgtgagcttgctcccggccttcttcgcaccctttcctttgaccgagggtggtggagcaggctcgtcctcttcctcggcctctgcagcttccacctctgcgctagctgcatcattcactgctaatctcccaatgccaacctggcaatctgacccaccgagcttccgcacgaattgctggtgtagtttctccttctctttcttccgctgtttccgctctgggtcttcctcctctaccgcagctgacggagcggcaggggagctctggaatttgaagatatcggtacgctggctgctgctgcttgcctgagaggtgtgctcgaagtgcacgcttgtcgctactcgtattggcgcctccgcgactgtgcccgtggttttggctcgctttggtgctggcaccacgatatcatcatcatcatcgtcatcatcagcttccggggtattgtcttgcttcggctcgggtttgtcggctggcgatgcttgttttttcttgggtgcattggccggggttgatgcgggtttctgggtgaagaagctagagatgctcgcttgctttcgtttcaatgatggagagggtgcagaggattgcgaagaatgaggtgccatcttgacgaaggataccaatgctcccaccgcaagtatgtggagtggcagtggagttacaggttgataataggagagcgacttcaatggaattcaatactgaggtatttaatctcagcttgatctcaaattaggtatgctccaaataatgtcccatgtgagttctccgcatctcggagctcgacgcgtacagaacgcgctagccctgggcatccacccgtggagttaattggttgctgactcatcacccccaatcctgcccagcccaggtgaattgctattttgtattttactgagaacaacttgagtcaattttgtgtgacaaagaaagcctatgtctatgaatgtctacaaggagtaggtgtatatgatttgaggtttgcatgagtgatgttgagtatagacatctacaactctgatagggagagagtgtgataaattggtggactatcaagttcatgtgcacaaagaaacaaatatcacaaactgcatgagcaaacaaaaccatcaatcaggcaaaacaggtaagcgacccagggtaagagacacggggcaagagacacaaggcaagagacacaaggcaagagacacaaggcaggagacaaaaggtaagacaaagcacagtcacaaagggaccatgaaggaaggaaccttcaagaaagaaacaaaccctcagagaattcttcactgggcaacagagggctatctctgtgaaaaggttccaaaaattggcttccagagagggccagaggccgtctccaggagcacgttgttcagctccacatacgtcaatggagaacctggggaagtacggtcggtgtccacagaggttgcagggggccgggccacaacatgcttcgtgcccttagatgagcggagctcgaacctagttttcggcctaacccaggccgcagcaaagatcgacgggagacagaacgagtgaagaagaaagaaagaagagagataaagggggggagggggtatttataccttcccaatggcttaaggcaacggggtaatggggttggtgacgatttttgaccaaaagggaaggcacctgaccaggtacctgactaggcagctccaggcagcggtctctggaccctttcatcacttcagactgtatagcatcaatggtagctcctttctctatcttcccattgctctttcaggcgacctgcacactgatattcactccagtatccgtataatcatagagaagcccactcctccagccataaagcccattatcatcaccctcagtctctcaagatctctcatccctctccccatctatggtccccgaagctgacacattaccatcaagcctgatcaacttacccaggtgatccacctatctcctcgtagcctctgagaaacagtaaggtaactcaacgcagggtttaagactcaactactagctgtcactggttttgccgagtgagcgatgttcacgttcacgttcatgttcacttaacatggctacatcccctagatccagaacaagaataatacatatagtctttacagaggaatatgtctataaggaaaggatggtattggtacagctttcacgtacaatagctgttgttagtctaatcgagtcaagttgcgaccactttctcctttcgtcttctgaccagggagtgtggtgacagacagtgcaagtgacgagataccagggcgacaaaatgcgattggtcgctgtagacgtgtttggttccagtcatcacaacaagcaatggagagaagctgaaggccagctccacttgttctcagcgagccgtcattcagaggcgaggaatagccggggcagctcgtatcagatgtgggtaaagtagatttaatttgctagacctggccataatgggccacattatcataccttcccagcactcgttcgtttcccgtattaaagtacaagaagagcaacatattaaaatgcgcctagatgatagagggtactgtatgtaggaaacacgagacgtagatgtactcgaagaacatatcaaacggatatctccaaaggtagagacgtcagaagtgatgaaacactggtagtggatcggttgttttcagctgctgcttgttgcagatgatttgaatgatctgtataccattgccctcgtcaaacagatgttgctggagcggcgatggagtaatcgatttgcagcaaggttataccatagcctgcttgctatttcaaagtcttcgcccgattccagggttacacgcttcgacgacatctaggttttcaaagactcgactatattgagcttgagtacagtagttatgcatgatcattatgaataatgagaacatggagttggcgagtgttcatcatagatgtgtcggtaagtttggaaaggcctgtctgtacatggaggtacagaaaaagtcgttcgggcagctctaggactttacgaagaggacacctaagaagaattgtcgagatctatacatgctacatggtacgaaaaacgtttttgatagacatttcatattgatactggctaatcataacattgtacagcatatcaaacagcccatcaaggatgggaaatacaaatggacacccatggataatcacaattgtttggaaatagcaattaggctaggtgtcaataagtccgggtcgtcgggcaagcgcaaatcatggtcaagctaccattgtcactgtctggggtttcggtcacatcttcggtcatttcggagcatttcatatcatcactgtatcgcagggttgaccagcagattgcatctgggatagatcaacagggtcatgagatcatgacatttagttcgcatcggtagtcaaatagtatccagaaaagaggtgcccgtcttctgggatggtttcttcggatggaactgtctggtcaattgaaagccagccattctgagcagtatgctcctcttcatactggctgtcatagaaagggtgcttcgagggggcttgcagggggttggagcgatacgcagccttgtcaaagccgtcgtattcaccaagatcaggaaggcatggtgggtcgaatccaaagtcatcaaggaaattgcgtttagcaaatggggagtgccaactgtgggggccaattcggccttgggggttcggaataggctcaatgttctctttgtcaacggaggtgtgtccaattctcaaggcatgactaccggtgttcgtctttccgttcaaaacaaggcgagtgggggtcaaggtgtcaaactgcgttctgaatcccgggtccgggtaggatgatttgctatcctcttcttccttttcctgatcaacaaaaatgccgaagccacctttgggccgcttgccaaaggtgttgacagtaagaccaaactcttcatcatcgccaacataagagtgagtacggtccgctgcacggcgcgagcgacggagaaagctttgttcttctttggcctccccttccatgttcttgcggcctttgtcggctttctgtctttttctgtccacagcacggggcacgttggggtcggctttggttagacgagtactcctggtacgagcgatgcctcgtctgggaactggagtctctcccttcagtgggctgtattcctccacgttacccgtgataatacgctccttcaacagacctccgtgtggggaaaagacctgttcggttggctccacgagcgaagaagtacgttccatcatcttcaagacagcaccatccttcttctggttgcgtcggcgacgcatctgcagcgtggcggaatcaaaaagatccatacctggccacagaactcccttgagtcttgcgatttcttcggcccgagtcttgtccatctcagggttgcccgatgcctgtatttgatcaccagaatcgataaaaggatcaggggtatctttgctagcaacccatgttctctccaaggggtccggtttgtatcggcgctgtatcggtgtcacgggcaaagccaatgatcgattttcatcagctggtccagaagcatcgaccggctgcaacccgtctgactttgtgccattcgaggatcgcatcgagcggaggatgggacccgttcgagatttcacattgctgtttgccataggcaaaggggttggcgtaatgggcgggatggttgtctccgcatgttgctgtttgtcattgtgagaatcagccaagcgagggtcgaggcaatcggaaactggggtagttgtgattgtagtagtactggagccctcagactcgacattgggtgctcggttacttgtatgtttagcggcggaagccaatgcgtcgtccgactttctttttttccgaacttctttgctggccatgcgagcagacagctgcttcgcgtagccattggcgtcaaaccaatcgtcgtattgcttgagaagctcgatcgcgttaggatcgtcggtgcgaagcttgagtttgaagtggctggccagatgagccttggaggcagcatgggtcaacaagtgagagacatcgctgaaatggggctgcccaggacagatgctacacatgaggatagtctcagccatgatccaaggccccgaaggaggcaacaactaaacagatagaacgagatgcaactggaaagggcaaaaacaaccaaactgtcgaagccaaagcaggtgtgaatgaagctggcgaaggagcgatggaagaggacgagagaccgttataagcacgtgcacaaggcggacggtcgtgcctgtcttcattatcaataagctattgatattcgaggaaggtgcgtattgttgggtcgcgggtaagtcacgggacgtcattgatacctcaaaacaactttcattcatcttgtcatcattatcttaaggtacacaatgggtatgtgccacgatgtcttaacagctcttgggccattgtaggggggtatgaagcggaataagtcaacgtggtcattattctccccccgcattgtatcccaaagtccatagggcaaagaacgatgggttattagattgcgggaggtttcaatatggatcgatcattgatccatctatcaatcaactgatgaactacccggcaaggcatttggtggtgattgacttaggcatgcaactgttgattcaagttagcaaatcatacgatagaatattagatactccatagctcactaaacagcatctatttcttcgaggccatcgaatttcaataaactcagccctgcaaggctgaaatgcgtatgatacacatccaccatatttcccggtcgatcagcaaagccaccagcatcggggtcctacgtaatggttagcaagagactacaagacacaataggcaattaaccaacctggcattgtaggacaaatgcggcaagcttatcgccatcgatccagtgcagacggtcgatcatggcaaggcttgatcctacccaccagctatagcaggcatctgcaagcttctctggtcgaccattgaaaccaccgctttcgatctggcgctcactgagccaagctccgagtcgatccttattcaccaagtctaagcgaccagcgatggccaacgcgccaatgcaggtgaatacctgaccagcgtgggactcggcaccggggcgaatgccataagctccatccaagttctcacaactttgaatgtgagcaacggctttggggacatcgactaggtccatcagacgcaacagtgacaaggcattgagggcaccatataagaatcgggtatctgtttcgccccactggtctcccatgaaggagccatctgcattttgtaggtttgcaatgactgtaagtaatagtttagtaaaccatccttgatatcagtaagtataagggaattctgtacaagacccaactttctccttgccgcctcgaccccgcttctcaagttcatccacagcatcaatggttacgaggatctgaacggcagagacagtatataacatatgggcatcatgacccggggcagcaccgaagcctccattctcattttggcatgaaaggacaaagtcgatggtctcatctcgaggtaaggtatccggatgacctaggatatgcagggctgtaagaccccaatatacaccgtttagtcgtaggtgctcggtcagccaatattccagctcatctttccgctgtgtcggtcaatcatcaccattcacccaacattttctttcaaggagcacgcacagtgtccaggttcttgatgtaagtaacatgctttgaggtgtgtagttcagagtctgcggggctgaccccggctctaccagggcccgatactagggccatgtcttggaatgatggaggtggctgattagaggggggacactgattggatagtggatgtgcaggttagtagatcgaaggatctgagagcttgtgaaattattaatgttcttagtagaaggcggtgaagttgtcagctagatcctttatgcacgacactgtgcacaaaacgtggcttgactttttgatggaagaagaagaaagcggttagtgggattcaaagattatttttggaatacttggcccgtgaccgctcacgtgaaagtcacgtgcgatgggtctcggttaataataactatcttatcgattgtataactactcctgacaagccctaaaaggttgttatgttgtacattctgccactatataatcaacactgattggtagaaacccaatcatatccactcagcatgccctgtgcaccacgctcaaagcactgtcatccccgaggcgctagtttgacatctccagccatgtttcagattggatggaacctcaaatgagaggaatgcgaaagcgagggcggtgtgtcagagaaccttgtgagccaggaataggtaataggaattgtatccaagggtgtcgaagtataactaatagaaattgtgcgggtatagttattgcatgcagattaatatcaaacacaatctattttttctctctagcgccccggagtattatcagcgttgtagctccgagtcttcccatgttatacaaagtttggtgaacaacgcagacggacctcgggaaacctctctgtttctaaaaatgtctctaaaacaggaattgagccatggcctgagtcttcatcggtaagcgggaatatgggttccaaggttcgacccgagacccaggctactatattaatttataaaagtggacgcggcacttcggacacggacacgtttgtgcattaatttagctcttacccctgatatacaacgggtttgtgaaatagatatagagtattaatggctgattaccttgaatgctatagatagactatttggccctgtatgtatatttgtacgcttctatagtaaccataaacaaccccaatcccaaccgtggatattccggcaaggaaaatcaggtactgttttattgcactgtaactggctcgccgatttaccaatgacaggccacatccactgtaacgtaaggcaacacattccgtggctctgacctacaaaagtggagagctctgatcattcgtgtactccggatggagtacagcccactatcgtatcgagtacattcgaactaagcaaatagaatctcatgccgtaaagctccagtgtcttgggtttggaggtgacgcgaatgtcaattgagtaattattattcatggaagttaagatatttatgatgcttatccaccgtcacattcggatcatcgcaaggtgttgggtctaagtgacgtttcgcccttcaggggggatcagataggaattaatattcccctctttttttcatagaattgtttgttgtatgttgtagatgttgcagtaagaagattatatggaaatgtttcaagtcaatataattgtgataattccaattttaattctcaaatcataactaattcttatactaatacctaataactatctctgatatgatctaataattatgacttctataatactagcgcggctggtctgatagtctctgctcggactagtgtaccgctaagtctattaggagaaacttggactttggcgacttttttttgtttacaattctgcaattcctcacctttcacatctccgacttcgacaactcctacataatacatacatcataccctgggatcactaattgtttcttttgactttgatccacacgactcctatctcgccccttccctgccgatcccttgaacttcgaagcgcccaaaaagagggggaaaacgtgaactcgcactgaacaagcccccgtctctcaaaacgtggagatatcggtgggaataatcgaacccataatatgaggcttttggtgagtgatcaacggacaatcaggacccgtccattgtttctaccatctccttcctagccttggctgtcaacaaagggtcgaggtgtggcttcttttaactcgggctttgcctgcatatgtcacctgcggtctcacctcttgtcttcttttctgactcttctgtttcctctcacttgtctctgatattgcgctgaccctataactggcgctccagatcccgcatcctcgatacttcgtttaatcccatactactttcgtcattacactggacgttcaggtagacaacattgcctatctcctagtactcctcagcttggaatccccttcgcgccccccactacacggccagacctcgatcattgatccccgtacaaatctctcagtcgcatgcctgacgtcggctttaaagctggccaagtacacatctagcagcccaaggatcaattcatctgaagctccaccaattcttgacccccaagccttcaccatcctggatcgggtctaattgccgcccaacatgtcgaagcgaatgtccacagtgcccaacctcgatctgagctcgtgcaagaccgactcgaagaaggataaagcctcatcgcctgtgacgccatgtgaccgtagttcagacggaccaagccccttaacaccgcgttcgcccaagtctacatcgagctctccactcttcaaaggcgcaacaattcgccctgtcgcgcaggactccgacaataaggcaaccagccctattctcccacatactcctggcatagagcctccgacacccggattcacagcgattcctcaacatttcccttctcccaaagactcaaggcatacgcgcgatgcctcgaaatcatttttcggcaacctcaaagcaccgaaaccatcccacaagtcacaacattcagatagctcggagaactccaccgaacatcccaagagtagaggcagctccagagaacggaagatgccaatggcttccaaacagtacgagtcaacgcctgaccttctaggggcacctgcccgtacgaatggaaccgaaaggactagtgagttcccctcgcgacttatgtgtagatcatatctaacaaaagattacagacggactctcaggccaaaatgattcgcagcaaacaggcgccaagaaagtcggtacggatttagagtccaccgcgccgaagaaaaacaaacaacgatttgcaaaccttttgacccgatctcgctctattcgagttgacgactcctccggacccagaccaccccgccggcgcccctctactggtcttgcgaaactcgaagagttcagtcaaggcgcaacgacgaccgcgaatccaccccgttgcgcgactgcgcgacccgaacgtggaggcttgcagcctcccgagcgccaagccgacaccacctctttgcgaaaagagcgtagccacggtaatatggtcgcgtcgggttcgttgagtcaagtttccggcgcctcggctgccattttcaacaatctgaagtcttcatcaagcggcactgcagatcgtattggcaaggccgggaaaggattctttagcaagatcacccgtagcggcagcacgaatgagagagatatgatcaccgatgattcgtacacgtgctcagtgatcaacctaccgctcattgagcaggcgagaaagactcgcattgcgaagaagctcgaagactgccgagacaagaccgagttctggatgcctgccttgccataccgctcaattgattatctaaacttcaagggttgcgaggaagagggcctttaccgtgttcccggtagtggcagggaggtcaagcactggcaaagaagatttgacacagaactcgacatcgatctcttcgaagcccctaatctatatgacattaatacggtcggatccctcttcaaagcttggcttcgtgagcttccagatgagcttttccccaagtcaacgcaaacgatgattgctatgaagtgcgaaggtgccaagaccgcaccacagctactcaaagacgagctctccaagttaccgccttaccattactatctcctcttcgccatcacctgccacctcaacctccttcactcgtacgtggaccagaacaaaatggactaccgcaacttgtgcatctgcttccagccctgcatgaagatcgacgcattctgtttccaattcttagtatgtgactggaagaactgctggcagggttgctggaccgagaaggaataccttgaacttgagaaaaagatggacgagcgcgacctgcgagtctcagaagagcaggaggccgccaaggcgaaggagcgggcctctggcagccacgaacgcgcagtctcgtcttccagcagcagcgctggggaagaagctcgtcagcctcttcgtcagcccttgcgccagcctgctcgtgaaacatcccgtgaaccatctcgtgagccaccccgcccagaaactgctcgccccgaaaccgctcgcccagcaatggctcgcccagaaattgttcgcccatccactgctcgcacccgaaaggccccgccgaagaatatcgagacgggacacacccggagcatctcccagcttcccgagcttggcccgccgctctctcctatcaaaatttaaatgcgaaagacgtctttcttggcatagatatgtctcagatgaaaacagcttcacgtcgttatctaccttttatgacctgcttccaatttggctggcccattttcctttctatctgcaggaccagataggattggacaagttgtttcagaatggaactaccttccaccaccacttttccctctccccatacttccgatacaatacctccatcgcctactaaccgtatgattgatggatatccccattcccatttggtctcatatagggatcagatgttctacaatattcccctttgatgtgtacatcttttgctctcttggcattttctctgaaattggcgaatggccggccgtttcgtttactcgtgctatactgcttgactcgcattgtttctccctccttttttgctgtctcttgtctatttggaagcgcagcaaatctcattccatgctttgcttgatattgcaacatctccagattcccctctgcggttgacattgatttccatcatcgctatttgctccatgcccgtttgcttcgttttgaaatggggtctacatttacattttgctcatttttgtttaaattatgtatctagcgtttcctttcgaggattgtacaatagagaaagcgggaaggctcactgttcggttcgagcaagatcatttctggtacaataatccccatagcctcacacagataatcaaaaatattgagctatctagtaaaggccatcgcaaatatcgacagatgcaataagagtgcttttggtgaatcacggtaggtccacaatatatgaagaatcccattcgactcccaaccccaacgccagagatgtaaaacgaatcaagacaggatagccagaggccataaaataagcgtgaaaaagaaaagaaaagagcacagaagaacccgatataaccagctcaatcaatgacaccctctcacttcgcacgagcagggttcgacctcttctcattcgaccgctgcttgcgctcattacgcttaatacggtccttgcgctcagtccgcgacataccgcgaatgttacttccctcggcattagcctcgccctctttcttccacttcttcatatcaacctcaacaagccattggttctcgtcgtccttgttcttgcccttgtaaccccagcgcggcacccactcgcccgaagcctcgtcgtattgcagcttcttgcggcgctccttgtcctggcccgcagcaccgggctgctggctgtacttgccgatgcccttcttgcgggcgaacagctcccatttcgtgggtgccttggggacgggcaccggcttgtggcgagggaggtggatgttcggcgctggcagggtgagaagaacgccgtcggagacggaggtcttgatctcgcaagttgtcaggagctggttgagcaggacttggacgccgtcgcgggctgttgctttcagcgagtcgttcagggtttggtctgcggggagctccaatgggttggggtcattgacgagcaggtggcccaggtcgaatgtgtagggggtgggctttgagacggtgattggcctgggcatggacgttagtttctatatttttcttcgttttctcttcttggctttttggtcgtgtatgcggttcggaaggagttcttacagtctctcggtcttggaaccagccgcagacttgggcgcggagttcgccatctcgatatcagacatagcaatactgtagtattggtagactgttgatgttcaaaggttggtatcagcccgaagaaaaaaaaagttggttatcagatacagccgcttttgcttttctgccatgactaaggcttcccgaccgcctttccttctcagggcgggcggatttcgcatcaaattattgaccgaagtgttaactgctgttgttctctcaactcaattcccacccacttctccatctcagcaccggttgtcccctcactggctgcgccggtgtgactgacaacaatggcctcctcgtggtgctggaattgcctctcgaggcttcgcccgacaccgcgagcactcctcccgccgtccgcaacgccccggatttcgagcgcctccttccactccactgccgtgcactatgccctgccggccaagaagaagggagctagcttgacctccatgaagcacagacagtcaaccagcttgagaaggaagaagaagaaggtcgctgaccgcggcggacgccccccagccgtgggtgagcgcaaggccttgcggaaacgcattgtcctgagcaaccccaatgcccttgagattgagggcatgctggagctgtccccggagactatggttgattcccgtctccgtggtaccgtcctgggattgcctgtgccgatgatcgatcaattgagagcagtgcaagccttcaagcccaaacagggctggtcgatattccgccggcctggaacagtccttcgacgtgataccattgagatgggtcgtttgtttgagcagatttctggggatgccgatgaggcccagaagggcaaggttgtcaagaaaattgttactggtatgaagggatctggcaagaccgtgcacttgctgcaggctatggccatgggcttcttgaagaagtgggctgttatcactattcccgatggtatgtgtatttgctgtgtatattcaattttgcagctgctgacctgtcactcttgcagcccgagatcttgtgtccggtgaattcgcctacgccgctatcgaagatagcaacccgctgaagtatgtccagcctactgcaacctcggctctgttgactcgcaccgtcgatgccaaccgggagctcttggctagcctgaaggtttcccagaaacacccgagtctgaagatgctgaagccttcctcgacccttgaagacctcgccaagcttggattcactgatcctgctgtcgcctggcgggtcttccaggccctttggactgagcttactgctactgcccccgccgcaggattggagaaggacttccagccccgtcctcctatgcttgttaccgtggatggtttggcccactggatgaccgagagtgcctaccgctccgctgaacacaagccgatccatgcgcacgacctcattttcgtccaccacttcctctcattgctgaaggagggtgaatccctgaagaatggcggtctcctcctttacgccacctcatgctcgaacaaccccaaccccgagggtctcaaaattgctctggaccgcttggccgcccgtcaggccggtatcagtgcctcctcgccggaattcccgcaactaccagcctacagcgatgccgatcctcgcgtcgtggacttcttccaccccgcagagaaggctgtcagcccactcgagttgcagacgctgggcggcctcactcgcgacgaggctcgtggtttcatggagtactttgcccgcagcggcctgctgcgtgagatcatcaatgaccagtgggtgagcgagaagtggagcttgtctggcggcggtatcatcggcgagctggagaagttcggccgtcgtgttcgcgccactgcttctgtctcgaaataagggttctatcttgcatttctttctcttgtcttatctccggctttcagatttgtgtttcacgtttacaactgtatatcggatcctggggttttccttgtgtgttctttgcccatgtattttacaaatctcacttggtccgcttgtgtctgtatgcatataatggatttgttttggaaaagttttatattcttcgtctcttgcacctacacgataacgaaagactaatccgaacaatagagactcgacgttgaatcgatcctctagttcacatccaatccagcaacacctcacgcatccaacttcttcggcctaggcgcacgtaccaaatcaggataatcaaacttagccgccacattcaggaaagacgaattagccgggtgcgcctccttacgcacatcatccccacgacacaaaaagttcatcgggaagccaacatcaaactcataagccccctcaatctccgccaaatcctcatccgacaaatcaaccccaagcccctcaatattacccaacaaatgctcaaccgtacgcccgcccacaatcggcaccacgtacggcgccttgcgcatcacatacgccaacgcaacgctggtcaaagcagttccacgccgacccgcaacagcctccaacaccttcgacaccgcaacatcctgctccgtcactggattctgtcgtccggggttcccgctgcgggcgatctcttcccgctgcgcggttgttttgaatgcgccgccgccgagagaggcccagggtgcgaggcccatgccttcggacgcggccatggggataatgtctcgctcgaaatcgcgcgttgcggcgttccacttaccctggtagacggagaaggggcggaggccgtgatcgcgtgcgtctgtggttttggttttggttaatttggccttggacttggtttgggggagtagtggtaatagccagctgtaatgtaaaacttacattgattcgccttgctcacgatccatgcgggggtatcgctgatacccaagtatagaaccttcccggctaagaccagctggttgagggaggtcatgacctcctcgatggaagtgctgaaatcccaccagtggacgtagagctatatatacggaagttgttggttagtatagtctcggtgagtaagtaagccggaagaagcgagcagccacgtactagatcgatatactccgtccgcaatttcttcagactcgcttcgacagacagcttcagactcttggcattattgccgacgaagttcgcctggatctcagacttgttgtgcgtgcggtagggcgaggtatactttgtcgcgaggacgatttggtcgcgcacgccgcgggcttccatccactcaccgagccatttttcggattcttcggcttggtagttgttggctctttggattttgttagtgattagatcctttgggaatattcaagactgattgattggtaatatgcatacgtgtcgatgaagttacctccgttctcgtagtatgtatccaggatcttgaaagaggtctctttgttgcattcgccgaggcgttctttcctgttttagtgtaagttatattgtgtttggatatataaggtaggtattctacgtaccagccatcgccgaagttcatcgctcccaggcatagtgggcttactttgacgccggcagtgggcgctaacagccggtagcggccgagatgggactttggggtggcagctggggcaaacatgatggaaagggggattcagggtaatttagtatagaattaaggattgaagatcaagagactcaggagaatctctttcctttatagccgaagtcattatatgcggggttgaatgtgctcataatccggtggttgcatcgaggtgtagcatgatgcctttaattcctaagtccggccaaagcaggatttggggggaagggggggggggatttagggttaactccggttttatgcaataaatgctacttgtttactctctcgcatgttgaagtaatgaaataagccctcgttctatttatagctcagatcccgtagaacttcaactggacactatatacggggctatccctgtcccatcttcagaatactcctcctcagtcgcctcctcagtcgcctcgtcagtctcggattccgggtcatcgagatcgtagaattggtcatatatatcatccacaatctctcggtactccatcaaatagtcatcaagttctgaatcgccctctccgagaacaccaccccaagtttcctgctttgggggaatcaccactggacctggtgtccaatcagcattcctattatcctgagtagcatcgtcaacagacacagatctagccttccccttatcaatagaaggagcaacccccctgccttggcatcgagggcactcgcagttctttccaaaaagctgcacggcatgcatattgagatcgaggttttcgccgacgggatcagcgatcctataacgttgatagggaattctgatttcttccccggctttgatatccttgttcgcccagatcactacgcggttggggaccttgtcatcgtatccccacagtgcgttctcgaaagggcgacaggaatgattgaacatgcttaacccgggaaagaggtagaagtttccaaacgatggctccattgccgagatgtcttcttttttctctctcattctactctgtagagttgggtgcagtacaggtttgggaccatcacggtccttgaacgttgggtttgcacctcgtcgcgtatgttcccagggtacagcattgactagcaacttccgcagcaccgtctgaataacccaagtatcgaaggagaggtcgctgaatatgtccactccaaggttggagaggatatcaaaaggtacctggatattcccggccagagtaaaagggaaccagctgtccctccagggctcgttcgtatcggtacctgcctcgagaacgaggagttcgttgatctcatgcgcgagaagattagggtcctcttggcggcgatggagcgtaagttcaagcacactcttcaagagtagactcaaaatagtcccgtggcgttcattggtgtgggtgaaatactgcgatccgccccatgccactttatttggtcgcatggcatcgtgcaaccatccccaatcgagaccgcagaattctttgaaatggtatgtttcgcgcgcaatatccaagcaatgaggagccactccgtctgatattgcatcattgggaaaacagaacagcagaccgcccctagtagctctggagtaacctacatccacacatttacatattatgtcaaggcacgcgcaatcatccgggtgtttccgtccggaaagaggtgccgggttacgaatggagttccagttgtgctcgatatgccgaaccaagtcagggttaatcacggcttgacagttgtcacatcgtggggcatggagagggtcttcactttcatcgtcaagcagcctgttggggatgagatttccgcgaataactggttcctcgtagtgaatcatggttcctgctttgatgtttgcagtggcaaagacccctaaaccattgaaggaattgtcctctctgagggtgggctgcacctggcatgtccgttggaaagacttccccgcattgccactgaccgtgaagatatttgcattgagtgcattgataaaatatggtgcctcgcgtctcacgtctgcttggtcgtatggatatctatcggcgcctgaaatccatccgcggctccactcatgtccataaagggatggatgaagcgctgacggattatctcttctgtgctcgatccccgctctcacaggagcgctcactgtcatccttttcttaggaactgacatatcgcggtatgacaggggtctttggagttgacccttcatatggtcttcgaaatcatcccagcaattcagtgctgcgaggctgagactggtgatgctgtgaagggcgttcctcagagttgggatgaaatagttgataccgtttgccttcctcatttgcaggacctcccttgtcattgggactcccttgatcttcaattctaccatcaggtgctgctggatggcgtcccaaacacgggtatacattcctggccgcttgttcctttgggttgctgtcgtcaacacttcgcagagaagctctccgcgataggcgtctccaatggcgagatcgaaatagcccagcagataatgacaataagcacggctgttccagtaagttggattgtacgggctgagtttaattgctgctgtgtacatttcgagtgcagacatatctgttctcgtggcagggctcactacagctcttggctcacgatagataccccaatgactcaggttgctttgtctcaagaccccaaagcgctcatcacattcgtattcccatagacggcgttgtaggtctgtctttctcccatctgtgcttagaccccttaatgtcagttcatcggtgagtgtatctttcgtccaaagacccggatctctgacgttcagcccgtgtacaaaagccctttgctccaatgcatctagcccctgcacgccgttgtaggtctcatctaagccctccgcggtgaaccgggctcgtgcatcatcacgcgagatcggcagaattggattgctcatcaggtgttcatagacattgtgagccaacgcatgcattaccgattcttcttcttcggttgctcgtgtataaggtcgattcgcatgtgccttccatgcacgtccgagggattcatctggctgctgccaaaatcgacgggcaagaaacgcgttgtcttcagtcaacgccggggctagcggcgctcgattgaaaagatccggccgctttggaaacgagggtggatggacaatgtctccacctgggtagacctcgtataatcgtttcctcggatccatcttgataccttggtggatccagaatagacaatcgttctagggatgggtatgtgaacgtggaaagagtatggcaggtctcaggatttcgatttccttgggccacatgagactgtgagtccaacacagacccatgtagttgccatgggagtatgaatgtcagattagtatcatacttgccgcagatcatggctgaaggaatccccatatcaaagggtcgggagacaaagaaagaggatggtttatttttggagagaacgccgattgagggtatatttcaacaaagaacagtgaaaaacacgtgttcttttggaataaacttgctttcgcaacaaaggaagataacaggtcccttgaataacttcatatcaccaatatgcctcggaggtacttgaaatccactctacttttagcgggaaaaccgccaagtatactccgtactagagatagcaaaacaaaggatgagatgcgactatgggattttctggaaggcttgtaatcctaggcctccaagcccttggatgcattccaatatatacatgtatatatgcccaacgggcagtgcgcggtcgtagttaagaagttgcactggaagtctcgtgggggtgacgaccccgtgctgaccccaaccccaacccaacacgaggatcaacacagccctggaggaatccttcggcaccttgaaaagaccggactcttgaaatattctcatgtcttgtctttctaaagtgctctgattcatcttaccatgcacggacagtctggtcctccctcacagccagaatggcgacttcctccgcgtctctcctcgccgtcgcaaccagggcctcctccgcctccacgtcccccggttgcttcatatgcaccagctgttcaatattcgccggctgctccatattcgccagccaactatggaccgatttcaaatccacagagactgccatcaccgagtgcgggtgcggatacaaccacgtggggagtgcggttcaaccagagctccggccccccattgccggtaagtcgaacgttagaaattcaaagtcgcataactaacagtcgcatagcctcgaccttccagtacaaatgagcaacggtacgcctatgcgcaatctcagtcgtatccatctgtcgcaactccttttcacggaatccaaccctctccccccccaccttcatatacaacactaccaccaccaccatctggtgttccacaaccgccgccaaaaatcccacaaggcactcaacatgtagcgggccaacaaggcgatcagacggggcgagctccactgctcgcccagggcgcaggagcggctgcgatgtctgggtcttacgaattccgccctgcgcctaccctcaatacaaatactacatctgtcagcgcatcggctctgggccctggaactccatcggattgggagcattttggcccaacccctgggcactttgatgatgcagcgtggttcccacctcgcaggacgccctctctgcatcacgaagggtctcaaccaccatcaaagcttccggacaatgttcccaacgtgtctgtggaagacgagtcggacattgttgctcgcccgagaacagatacaaatcaaacgcttccaagtattgtctctggggtcacacagtcgggacagggtggctcaaattcgcccgtcagtccatgcacaacacatggaataccaacaccgccccaactggtccgcacggataccaccagctctgccttgtctacaggtggacgttcagaaagcatcgatgatgtaataaatgcatgggttcgcccattatcgcctgcgcataaaccagttcaaccggaacatcaaggcctccccggcgcgttctaccagactagcccagtagagcgcccgcagtcaacgcaaaacagctcgtcatttttcgaccatttgcagtcgggctcgaatggttctgcgcaagtggtcgaaggacccagaagggtggctacgccagtaaaccaagaccccttcgaagatctggacccctgggccaaatcatcgttggaaagatatgtcgccatgctacgtaaggaggcagtggctgacttagatgaagaacgatataaaatcttcacggcttttatggccaaagagactaagctccggcagattctctataatattgagcctgagcctgaaagtaaatcgctgactctgcaagctcctaatcctgcccctcctcagccgctaccaacttccaataaaggcgaaccagctgttgagtcgggactgatacccgttgcgtcagaagaaattcctccctcggcggcaacggcaacagaggatgaagatctcgatgatgttggcagtgagtacagttcaggtggtcgtcctctgctcgttaagaaagcgcaaggaggctcgcaggctgttctgggcttacctactgcgccctcgggcgcagagtcgaatccctcaagacccttatcgatcatatcgatggatacgcagaagcaagtcttggaacccttgactacgaaccccccgcggcctatatacacgccattccagtatacagagggtccccagcgaggctcggacaacctcacctttgctcgcccagcatatcaaggctattctgacctgcggcaagcagctgtcagtgggcgagtcatgtcaaatgcaccagcaccagcacctacatctcgatcgaactcaaatactgcacttgcttcttccgcgcagaaagatcccgacgagacctttttgggtctaattcgtcacaagagcgtcgcttattctaaaccggctgagcgaaactctccaccggttccattgctgccagaaactcttcgtcaaggccggtcgaggggcctcgtggaagaattacgcaccatattacggacacccttggacaaacggtctgaaagctcatggcacatcacgactcgggaagaacttgaaaaatttcctgatgatttttcgtacatccgacggaccgttgatcaatgggaggaaacagcacgagccagacggcaaaatctggaacacgagcgcatggctcgtcaggatgaatctgagcggcacatcgatgatcttttcaatgggaaagagatcgggtatgcagacatcaataccttggaagaagaatttcggcaaagcgaagctcgggtccaattagaggaggaacgacacgaagtagacgatttcatgacacatgtgttcaatcctttagatgaaggcctaaaaaatgagatttcggcacttcgcaagtcctatgactctgctctcaatcaactcgaccttgatcaacagagcaaaggttcaccaagcgagcgaggcagcccatccgtgaccatgaaaattgtcaacgaccttcacaaaaagcttgagatccgattccagaaacgtcttgatatagcccttgactgtgagcaacgacggaagagggctgagcggcgaccacttgtggtcatgggtgatatatcgggtctacaaaaactagacggagagtttgaccaaatggaacggcgaaacattctggaagcgtgcaaggatcgtgatgatcgagccaaccgactcatggattccttcgacgacgcaatcttgcacgggctaggtttaaatcagagcctcctggacgaggttgcgtcgagaacagcccgactagataccgccaccttccgagcctccggtctaccgcgctctgaaattgggcagattctcaaatccgcggcaacctttgcggcgtcgctcggagctgattcggaggccatcatccgcagcgctggggttgcagacatgatcctaaacgacgccgactatggagtctccgtcgctgaagcgcgttatgccaactcagatccggagattttccatcggctgggggctgagaagataaaagaggatgagaagatccagggtgaaatgaattcaaagttgcagagcattcaagaggggcctgtgcagatcgaggccaccattcaacgtcttctccttggcttgcacaacgacccacaagccgctgcccctgtctctccagttcaaggcttctcctcaacgagcccatctggggaagtgcctctacatcctccaagtcttcgcccttcgactactagcccgggtccatctcccagtcccgcgcccgtgagccaaactacggatgaagacttggaacataaacagaggcttcgcagagcattagaggcagccaagcagcgcaacgctgccaggggccattgaccgagttggggggccgaatggaacatccacgacgcgacgaattgtgatgaatttccttgcgtttctagcataccattttatctgtttccttgtcctgtccttcaaatgttgtgtttctgctgtcacgcatttttggttgatacccactttatgcaactagttaaatgaagactgccccatgacattcattcgttctttctctaatcaatcaacctctgtatccaagattggttccgcttactccaatcctcgacctcgttcgcctattaggattagtagaattcgaaaacagattacccttgagacattcatgctttctttcaaatcgttgccagattgcgctaaacttcattcagtcaaggaaagtcctacattgttttcgtgatgtaactctacctagggaggggcgagtttacaaacattgaacatttgaagcgggggcttgggcatctttcaaaatattcactttcccgttatccaaaaactcaaccagttgacttcattgcttgctcaaattgaatccacatccagttcacaatgcaaccaatttctagagttgactgggacaaaggtgataatgatgggcttgtcactgtcggttcccataacctctacctgtccgtttcggggccagatcgcaagcctggagagcctatcgttgttctcatgcaaggccttggcagcacggtcgatgagtggattgcagtgcgaaagcttgtggttccatttgctcgttggttgaactatgatcgttcagggttgggtaggagtgaaggtcccaaccaaacaccaccaagcatatctgcagcatcagtcgcagcagatcttgatacacttctaagaaacgccagtattgagcctccgtttatcattgtcgcccactcatggggaggctacacttctcgcgagtttctggaactcaggcccaatgatgtcgtgggcatggtgttcgtggattgcaatactgaacgtttatttgacagtggtgcgtggggttgggacgttttcggtccagtcctcggtgaccaagactttgttgaaaccaccggtcttgcaacgtcccatgtcctatccgaggaggagtggaaagccgtcagagaccagcaggctaatccccgacatggacctaccgaggctgctgagttgcaggcggtgccgaataacagacgggcattggcccacaagaatcaacttgaaaagctacttctcaaggattatccggtcagtgtcatcattgcggatacacctaaagatttccagaaaatgtatgactttggagtggccgcaggcaatggaaccgaacaagaacgagctctgtttcgaaaatgtctcgatagatggcgcgagatgaatgaggactggcaaagagatcttttgaggctttctcgtctcagcagatctgttcgtctgcattgcagtcacaatgtgcagcttttacaaccacagagcatagttcaagaaatacagtggaccatagacagctgcagataaccctcaatctgctaataaagccttgagctcccggcttgcaaatcggaccctccaatgatgtgaccttggcttttgatccttaataaagaatttggagcctcgaaggaatggtgcgtggttgcgaccgggcaggtgcgtccgaatattgctggtggagggccattttcagcgtcaggaagtgccagtttcggccgtcccagcacaaatggtttctgtttagggggtaaattgtctattttgattattttgtctcgtgcaattagtttatagccaattcctgctgtgtgaaccccggttattgtctgctttcttctaactgtattcgagtttataatattctaagattgtatgtttgtcgaagtatacgccttgttcgggtcaacagcacaaaatttgacggagtctttttcccgatgttacacaaagaaccttttgcattgtattgttggctataaacatcagcaccatagcattatgtcttaaccacctccagagttcgcaggacgactttggtaattgaaccagtggttgacatcatacattctttcccccttcagaagacccgtaagattgcgatacagtttgacggccatgctgattttgctttctcctcccttcgcgccactgtggctgcgtcacgtacaggaggaattctgtcaagtgatccaacgtgcaggacaaaaaagaacggcgcacagacgatatctccgaaccctcagcgagccaaacccaagaaagttagccatcacctagggcttgtgtgaatctgaccatttctaggcgccgagggatggcgattggcagacgataaagccgagccagagagctaaacgccaatttctgccgatcaacgctgttgcgcagtcaaaagtggctgccgcagctcgaccggtccttgtctcaagctgccccgcattaacttgcagggatggaggattacctctaaacccaatacccaatatggcgggtcttgctgtgccgcacagttccctgcgtgccgcgctcggattcgctacgctttcgcactatacaatggatatcgtcaccatcccggacacgccgctacagcatagtctcctgcgcaggatttttggaccacttgacatgtcgacttcggttacagctcggtgatccactctttggtgatttgtctgcgcgatatgcaaggcagacccctgctatcaccaacacatctatgatcctggagacctcgaatagtgtctgaggactttgcggcgtatgggcttgcttatcctcggctgtgctcgccggccttgggagtcaagagcctcagaattctcatgggagtgtctccatgtcttccgagccaatgaccatcctcgtttgggatagtctgtcacattcgaccacgttgatggacagggatactgcgctttctttgtttttctctttgagggttgttgcgtggcacctggacaaagaaagcatcgggtgacctatccgagagccagcatcctaataattctccactatggaaaataccaaggtgcaatcctggccacagaaaaggaacttatctgaatggtggacccaagtgaggctgctctggagcttggaaacaatttccaattccttttcggtttctcgggcggcgatcgcagcttgtgcctttgtggtttgacctttggagtgtacgggaagcacgggaagtactattcccgttatctcgtgcctgcccttttctctgccctttttccctgcgtcggggtcaatatctatgccgccaacagcgtctacatgcaaatacgagatgcaagctttgcattggccaactgtagaatcagccactgtgcggctctcgggcatcaacagacaacataccatgatttttaactttcagtcgattccagtcacattcttttcagttgcatgcattgctctcggacaaaagagcgcagcatctttacgagacatggccctgtgttccccggagaccgccgtagccatgcccgaggtcagaatttgttttcgggtgccaaccactaaaccccagatcttaccacaagatcccccattagtggatgtctgtgcgctgtgcgatgatgctgatcctatgagacggtactaggattaaacggcgcggccttgtcgagacatcaccccttccttttcctcctgcggcacctcccattgaggctccaaatcccccccccctctttgcgatctgagcactcacctttcactaagcgctgttgggtgggaaaaaaaaaaacctggcaaatccaaagatcgatttccagccggaaaggtcggagatacaattattttgcgcagtcgaaatgaggacaaagacatgaaaagcattgtgtctcttcaatggcccctgattatttaaagcgggcgccagggaagccagttccatggttcagtgtacccgcttccgtccatgggtcgggagaactctgtgagtctaccaaagtccaccgtgtgggaaaatacgctgctcttcgaattccgtagcccctcttttgatttctggaggggacgcctgtcttctctcttttcttttcgccatgtccgctccaacgggccaattccacaggctgtccattggtcgaaatatgccagatacggccttgcctactagaacggcccgcacggggcggtcggactcttccagcgacgaaagtgatcatggagaggccgatagctcttcggagagctctagcgatggagaagaaggggacgagggtgagggcgaagaaagcagcggtgacgaaccgtccgaatcgaacagcgcctccgtcctcgcaacatccggcatcacctatgatctcagtcaactagattccgaggctgaagccagggcctttgtgggcttgaccggccatttcgatgttgtcaactgtcgctctacccccgccgggtatgacttccagctgtcggatcggccacaggtgcacatcggcgcggactcgtctacctgcacttgcgcggccttccaggatcgaccggacggcgcgtgccagcacatctttgtgagtgtgcctttttgggaaaagaagcttaaaacttgaagggcttgaactgccgatactaatccccatcccctgaacagtggctcgtcgatcaactgcacggctgcttcctccccacgcctcggtctacggaggtggcactgactccagatggacgtccggaccgtctccctcgcattgaggaccttttgcaggggaatctgatgtcggttgcaacgcagctcaaatggccgtaccaacgggacgaggaggacggcatgacgcggacagaaaaggtccgggacattttctctgcgttcagcaaccggactctcccagaagacactcgccgggacttgacagagacaaccgagcaagcacgaaccgcagagcagtgcgtggtgcaaggggatttcgaagcgaccatgttccgactcgcagtgcacgatgacggggttttcaacagcctatgcaaggcgatgcccgccggcgcgtgtgcggccatctacttcgacaaaatacaagagcagtcacgccgactactgagcgacttcgaccgatactgtgcaaccggtgagttgccggcgaaccccgtggtcccaggtctgggtgtagaggtcaacgacgttgtaacccatctccagcgttctgtgtcccgcattgcagccaacatcaccgcacgcgcccctcacggctctgaaagcgcggccgaagccctggtgtctcttctagagtcagtcgtggctcgcaataatgatcccctcgaaggcaatccccagggtcgccggtctttccacggcgaggacgaggaccagcgcaatctgtatcacttgctcatcgggtcggtcgaaacagactccgaaacagacgcgcggcactttgtccttcacgcgcttgatgccctgccgccggtggacctccaccagtgcgccaaccgcctgcgcgatatcctccgcaagatcgaagtcaaccgtgctccgaagccatatcttctccatctaggctcgttgatccgtaccggcgaatcagccgccaccactgcgatgggatctggacaaaagcgaccggcggctgggaatgggaattctgggggttcaaaacgaacccgctgattcgttctcaatctttttttatacatatgtttgttatattgttctgggaggccatcgtgttcattcattgcgataccccgctgcatcgtgtctttgcgtttcatcagcgacggatcgcttcaggtctattttgcttctcggtcatggcaatcatttacgtgtttgatgtctactatctaatatacgatcataagagctgctagcattgctatagccattggcatatacaatgaccctcacagacagcgcagacaaagtttccaatccaccagagctaccaatgtctataaccatgtaaaatgcaaaatgcaaaatgcaagtctcatgagaaagatgtcgtcattcccagtcagcacggccttgggaccccacgtctaccgtgagccgggtgtcaccgctgccacgggcagggattagttagcccgatttccaatgccgaaccatggtacaactctcggtagcgtgtgggtcgcccacactttgaaaaactctcaattttcttcttcgggcgcccagcaaaagcacgcgaatcagcgcaaagaccgaaataaaccttgcaaataccgagatcaagatcggaacgcatccatggaaacgtagatctgagatccagatccgttcgatcgcttcgcacatctacgcgtacattttgggggacggatattggatatcactacggggaccactcaatttcaatttcaatttcaattcaatctcaatgtgcccctcaatccaacgcccaatgcaccagttaatttcgataacactcaccaataacgtgtctcgaaaatgcggtgtcctctatgctcatcgtacgattaggcatacatgcccatgcgatatttggcggtgagggtttattaggcactcagaagtggatattacgagtgatatagtcgttgcagagcaaagcgactgattctaacttctaatgctgcgcaaagcccctcttactggcttattggcttcacagcaacccctcagctacaactcctctgcttttgtcataattcagccgaaacttgtccacgtgaccttgcccggtcacctgacgctgcattaaaacgctattatttcagccccattaggagaaaccatggacacgtgacacgtacgtaagatcttctgatttatacttgcttcgcttcgctccgcaatcatgccatgtcgatgttttcgacagggattgatgcccaggtgtgcgactaggaccggctaggaggtgtttagaccgtggatgccaatttttgggcccgtgcacacggtttgggggctagtgcttagggctgtgtttagctttggggtggacctacagggatgttgtataacttgacaatggtattgtatgccggatctacatatctgtatcacgatacaatgtcggccatgagaaggtgtaagatcgttttcttggccgatttatctttgagcaatcgggtttgggaaatattattgtagtaaatcactgagagtatgaaaaactccctgtagtatcaatcatttgcacaagactaatccgaggagtccctcttcaataatctgagtattaatcccttcaaagtatccaaatgatcttcgtggggatcttctgaagatctgaaaatctgaaaatctgcgtcccgttcaagtagaagccccaggcaagagggtcttactacgaggtgctgaatgagcgttcgcctcgaggtcagggtagtgaagactgttacaaatatagccgcgaaacgccgctagaataattgggatagatgatagacaatattttatgcggatggctttgatttttgaacgcatgtgtcttcgataggaagtcagctcttgagagtttgcatggctttgctaccttctcaaggttgcttgacttggccatgatattactcaagagtgattatgagacgcatgatgcatcgtctgaacaggtatgtacctgggtacatagtggaaggcgagaatggtgattggatagatgataaaaaaccaataagtatccgttggttaagtatcaaagtcagtggggcacgagaaaggatacccagtggcctagttggtaactctatcgaacagtacctgctctaaactaccctctaggtcatgtcgagaattacgcactcacggatctgggttcgtttgtccactttttttatactttttttttctctctccctacttctgttatatgataacagttttttgctcttcgtacgctttcaattttgcagatgacattcagcattctatcgaggcatccactgtatgtcaacaacatgaactccagtatcaaaatgcgcgtcattcatactattggccttggcctgggcgttctttgaaatctccagtgtagatcattgcatagtcgccagatggtcatgtatatcaacgaagttgttccgatccatcgtctcttcgtctccaattaactattctttctctatgtcttgatattcttctttaaaaggtccatttgtcccaaatttaactggccagactgccattttgcttataaagcacactttttctctttcatcaacaaggccggctggcccaatggcaaggcgcttgactacgaatcaagagattgcaggttcgatccctgcgtcggtcacttctttttttgcccatttctttttattcgtctctcgttttgacctttcttttccaatttttgatgtgcaaaatattatagagtgaatataaattgttctcggcatttttggcgaaaaaaactcactcaattggtgcaaaatatcaattatcgaatatagcggttagccgttatatatcctagccataacaccagtcaacaaaccaactttactaggaacgaacgaaaggttcctataacaagatgaaaccagattcatatatacagcattcatccagaaagatccaacacaacccgaccctgcatcttcccctcctcgagctccttgaacaccccagtcaaagcatccatcttctctatccgataatgcaccttaatgacacccctggcagcaaactccatagtctcaatcgcctccttccgactcccaaccgccgacccggtaatagtccactgctggccaaccatcgcagacgggaacgccgtcgcaatagcctgcgggtcatgttccggaatgcccacgcagaccagcgtaccattgaaacgcaacaacgacagcgcctgcgcatacgccgcattcacagccgtacagacaatcgccgcgtgagcgcccagtccatctgccagcgaatgaacgtgcttcgtcagcgcggccccatcatcgtccctcgggaactgcgtgatatccacgaaatgctctgccccagattccttgacgagtccctctttgctgccgtagtcgatgctgattacgcgcaggcctattccccggctcgcgagctgtactgcgaggtggcctagcccgccgccggcaccggagattatcacccactgtccgggccgcgcgttgctgcgtttcagtgcggagtatactgttacgccggcgcagagcagtggtgctgccgaggcggagtcgagaccgtctgggataggggttatgtagtttgcgggtcctagtgtgtattgctggaatgttcctggggtgtagtagccggagactttctagttgaagcacagtccgtcggagctggcttggcagggttctggatggggggttgttaagttcgaggtgtatatttgggttgttgaggaaagtaaatggtatcgtacggcagtgcccacatgcactggaaacccatttgacaccgactcgatcgccgatctttaggtttgaggattcggtgtctgcaccgagtttgactaccttgccgacaccttcgtggccgcccacttggcctggctgagttgggtgtgggaacgcgcttcactgggtggtattagtaagtacccgagacagagagggtaggatagttatgtgcatactctgttggtcatgatactaaagtccgagtggcacacgccggaatgtgttctatcatcgtcagtactattctagcattgaaatcaagataagaagtacaaattaatgagaacctcgcccgtaccaggctctgggacatctagttccacaatctttgtcgaaaccgtcccaggctggtcgtaaataatggccttctgattggtggggatttcaggagcggccattatgactgattaccggtgacaggttgaaaggaggccagatgttgaactacgaagttaatctcaactgaatttcaagcgtcggagaggtgtctatagagaagatgcttaattgaatgctggaaatggtcttgaatagattgtctcattttgtcaagtagaaaaagaggagaatagcgaagagggtcctgtgatcgaatagcggggtttgggacttttggatcgacggatcaaaggcacacgctggctgtgcatgccgaggaagctggctatccaggcagtcattatgatagtgtttctttgtgctgggatgaagtgaggggtgaaacgcggagccatggaaggacctcggttccataagctgcatacatctgcatccattgctggaatgaacaataaagtcagaggagtggattgtagagagatccaagacgtggaatgttgggagtttatatacattggagaatccccaaggtcctcatccatttgataacattagaaacgtgctatacctcttttcggtttatcttggagaagtgattgcactcaaattatgaacaatacatgtggactaagtatttttattggctaaaatggtgatgatatttttataaagtgcttggcctgaaagtagcagcaaccatcctttgtatctattctgaacctgaaaactgtacatcaacgccccatatttaatggcgcctcgcaaagcctatttaccctgccttgtgtaatttatattgtggacccagtacacattggtaagagggatcaaagaggcttggattgctaactcgtgtttgtacatcaggcagaagggccgaaactgttatattaaagcacagaccacataaaaagggttcccatacaaagattgtttatcggggcgtatccttgaccctggattaggtattcgctggctacagcatcggtgccagcgagcgggacgttccacgtatacgtgtaaccactctgagattgaggcgcgacaccgatagaggaccacgaccactccgcattagatttggatttagaattccaagtgccagtatattcgtaaaacccagagtaaaaggcattgccttcgacaaggtagttgacgatctggtgcaactgggtacctagactgtccaagcctggcttgtccatcggccacccgtggacgggtgttgggttaaatgagtattgatcatcttggttgatgccgatgaatagccgcacaaatgcgtatggtaccaggacgtcggctttgtagacaacggtgtcaccattctgtgtatagctaacattggtgattggaccgtcggacggtaggcttttcgtgctcgccgagatcgtccgggaggagccaccgccactacctgaagctaagaccgtccgtacctcgaaggagataccagaggatccagggtcgagcatgccgaccgtagctcgggtcaatgaggctggcagttccagtaccagtgcaccgtccttatatactgcgtagccaagagcattcgaaactgatgaccaggtgagtgtgacggagctatagtccgaagaggagatggcgacatcacttggaagaccagcaacgtgggagctagtagctttagctgggttaccaatgagaggcgtgccacctggtacggcgccgatgagtgcttgcatataagcctcgctgggtagattgtcgtaagggttgggttggtcatcatcggtaatttccagtaagcctgcatggcggctcgaggcaagagcagcaacagtcgcaacctgatcctgtggaactttgtagatgatgtgccatagctttcggggatcctttggcgtccaatcattaggcacatacgagcttatataagtctcgtagctgctctcgaacgtcaacagcgtatccatagtgttttcaaaacattgagctattggagagcccgggttgagtactgtgaatgcgccggggtatttgttcttcgtatatttgttgatgtatgcgtacagatcggcgtagatattgttgggaccgcattctggccagccttcatcaaaaaagataccgccgagactggtcccatagagctcgaaccacttgtcgacatcttgttcgatttgcgaagcccagtctgcgaggtctttcgagcctagtcgagtggtaaattgttgttgactcacgccaagatagccagtccgaacataaccaaggatctttttgccttgactcgcagcttgatcaatcaccgatttccaggcttcatcgaccacataatctggaccgttcaaaacattggcaaccaatatgctgagtttctgagtgtcgtatgcgaagattcgttcccacgaagccgggtctcctagggggttgatatacgacgccaccgcgatttgttctaaacgcacgtacaccgtattagttttgttttatttgaagtagcaagccaattgtacgtacggcggtttggagcattcgagtcgtttgatccactcgagccggagtaagaacatgagttgtaggagaacttctccggtatttccggaagcccattgtcctgctcgttcttattggccatttcataaatgaccagtgaggcaatgatctgatgaagtaagggctggggatggaacacccggccatacctatttatcaatcatttgtcagtgaaatattctagcccctttcgccaagctggatcaatttcttacccgtccggtaggaggtttgggatctctcttttttcagaatctgtggcacttggtgccaccttggagacggcaagagacttgattgaagcaacagtttcgtcggagatcatagattgatctgacaacttggcgttgggatctaaccaaagtgtaatctgcgcgagctcgttgacagaaccctcaaaggttccatcctcaacttcatccacgcttcgtttccagggattagagcccccgaggtcaaaagtattgagctcgtagaacatgagaccggttcttttctagtcgtcaatggtatactatacaagtggtaggcaagaactcaccttgtggtgctttcaaccgttgattcgtcgacgccatcttcacaaaagcggccattgaaatggcccacgtaggaatcgtagttgacaaacttgacttgggaacctgctctctctactgcagccgcctgtagaacaactgaagttagtcaaacctagaccagaaaaaggtaggggcatcaagaccaacaatctgtgcgttgacatcatcgacaagttcattcatgacttttcgatgatcggtggtgagtttccccgaatcctggctgacgattagtgccatgccaaacgtggatttatgatgctactcacccgagtccaaattgaccagctaacatcatcacacgcggatgttagatcttcggcgaagaatttggcgtaactttaatactgtcagcaatgcaaaacgaagcaaatgtcatgacacttacccagtgtagtagatcatcccactatcttcagttagccttgaaacctgaaatatggagcatttttactgactctgaagctagcttcaactttgccgccgtgatgacagtgtccaagctcttgccgaaggcatcgtcggcaatcatttcttgtgtacgggccaattgcccagcgcagcccagagccaaattttcccagttgaaggaatccttccaaaaaaaggtcgtctcattggcggccagacgtgccacatccacttcgtctggggtaaatgaagcccatcggaagatacaatggttcaggatattcgagagctcaacatcattgccacctaggtcatcactcctgttagtacagttcatgaggtagacttgggtgatatatttaccggctgatagcaatataacctgttggtccgcgttgagtgccggaatttgcttttcgaggacatcggatgtgactgccccagagcatgactcaaattgaaaagtgcgtgctgcttgatctcccagccgttcatcggtatggatgagataaggatacgcattatcataacgactgcatgcccagtcttttcaccgggaaagaatatctgtcagtaaatgtccttcaatcctaagccagggagagatcaataccaccgtaagatccaagccggccaccagcgccaattccagccgagtaggaatcgccgatggcggccatttttgtgatgaaggaaaggtctgccgggtcgaattcatcagtagtatctctcccaaacaaatgttcagtgttcaggcttgcattccctagtacttcccggtacccaagagggtttgcgagagtataacttcctagggtagcaatagccaccaggctatgccatgatggtttgagcatgtcgaacttagaaggccagaagccgatgagaaatggagagaagatgatgaaaatgggcagaaagacaatgagaaataggaaaaggaaacaggatattgcgaagactcaaagccactagaagcttcaagcgctgtaagagacttcttatacccatgctttttagtgtggtatcatacgccctcacggcttcgccacccaatctcaaagttattactagttctgtcctcactatcactatggcatcccaaatcggcacgcaaaccgcggcaaatatggttcaaatacttggcgcataaggcacgcggataggcccggataggcccgtttagtggatactcgcgtaaaagccgatatacataactaccaagcttcctaccctttttgttttctctctttcattattcgtgtacttcgtaatagtctatcatgttggtcttatccttctccttccatctttgatctttgatcttttcttgaacttgactctcacaggtatcaacatgtgccaggttagcccctgacggcgccataacgcgctagtgctagttagattagcattaaatgcctccgtcgctactccgtactgtatccacaaccttagcgctcagacttttccctagcgctccaactttgactttttcctggaagaagcggccccaatgtcgatacgcatgaagcaataagtccgtctcaagctcataaaagcattcttggcgcgggtttccgacatggtgccaatctccgaacgatcacaagtagtatcaatactggaccctgtagctccatcagctgatcgatgtgcttcctctatacggaactattcgttagtttgtccatattagcattttaaggcgtgatccatcggcttgtcgacattactttggatattggagctcttgctacaaatggtaatactctatcttgccgctggaacccttccggcaatcttccggcaatgcaacactcggaccctttcagtgggccaagaaagaacctccctcgccttcatttcaggactagcctcgcatgttagctcgaatccaggctgtgtttatcgaagaaaaattcatatggaccacagcacagaaaatgagatgtaaccatccgagacattctcatcggagtacagtctagtatagagtcgtatagcagtaatactagtgctattccgccactagtgtatagtgggactggtccttcaaacagaacaagagactagcaggcacagcacagtccaaagcggcgatgcttcgaagacttgctggacctcataatagtcagtcgcacactttattggaatcaataattccacctttcactcttggtagcttggatactagctattttaacttgataaggaatgtactatgtggcctaagtacggagtacagaaatgcaaatgtagcgttccgagacatttggctttggccctagcgtctagcatatacgccgcttcgtataataacatatagttattcgcgcaatttaaatcttgtcctagattgagaggtccgagtcttggctgatctaaaaggaagatattcggattttctaagcgacaaattgaagccattattttcactagttagactcatttgtaattgaaattagacctattgtacatcggccagacaaccctttataaggatagactagcctctgccgctcagagatatgtttctgggaacaacaggtacttcttggagtttcatcgttcactgtgcatgagtatatgaaaagcctagctttcaagtcaagaaatcatactccgagccgttgtccatttccattgtcgcggtgtaattaacgccttccttcaaccggagcttgacatggtggctaatgtatttgaaatttctagatccccgtcggtcacactcaaattgagtgcccgcttcaacgatgctcttcccactcgtccgaaagatcggtcttttggcctttggggccttggtcgtggtcaaccctgcacttggagcaaaacagcccaagctaggtagttacgacctgacggaagccaaaatgccgcttggcccgctcaaagttaccctagactatagcctcgcaacaacttggccgacgccgctggatctcaatgggccaaaggtcaagcgcaattggcaatttagcacccacatggtgttcgcgaattccgttgatgaaatatcggacgggcagctctggcaaatagcacgagatgcggttgatgagatgattgctgaccgaagccaatatctcatcgggcccatggcacaacctaacgccatgggaattctggcctggggcaatgagatcatacttgcgtcttctatgaagggagcaggttctttctcctatgactttcttggaggtgacaacccggtcggcagaagactagagatgtgccagatgctctgggggggagactggtcgactacccataagaacaatggtaattgcgcagaggaattcgcggccttcttataccacagacaaaacgaagttgaactgaaaggacaaaacccgagagttggcacctgggtcgcgggaaaagcttggaaacagatagatccatgtggaactggtgatgcggtaagtaattagtgttcttaggagcttatgcttcatgaagattaactgacaaatgtataggacatttgggggtgcaatcttttcgtccagggtgagggaatgagggtaatggatactgaaacagcaccggaaccttacacgttggccagccttgctggaggcccgacccgtcaggagcaaattcagtcatgcgggggtgatcctagagtattctttccgtagaaaaagattatagtgaatgggggtaggctcgaagggatattgttgacagaaggacttgtattagttatatatggggggcctgcctgatcttttcaggattccactgaccgccttatataccactttcgtgttacccaataatcgaaaagtaactatgatgtgatgtgcaatttggaaggtcaagaagtctcaaagtccacaatctaataagttgcaggcttttaaatacaaaaggggaatctcgcttctgtgttggggatcccaataatattgggaacgcacaacaacaaagtgagcagagattctatccaggacaagggaaaggaccggggtcaaacgcccaattgtctgatggcgtcaatcgccaagacgtttggaaagccaagcctggatttcaacacagacctgagtccctgactggttctgcttcagttattcgaacctgaattcccgactggtgacctatgtcttcgagaccctgtaacaacgcaaggtcccatatccccaattctttcgctaacagacgaaacccttggagacgaggagtgaacgtctcccattcttgtagccatggtcgaatagcttctaacaagtatgtacattcccattcccattcccattcttcttggagacatagtctgtccgtgacagtcagccattgaaggcttcttggaaggcattcctctaggcgagccacattaggcgtagactgagaaaatccaagcagaaaggcaattggaacttctagactttgcagcatatggagttcgctaaaagttttgaacgaccctttaaatcggacctccgggaagttgagagatgcatctgagagggatgtccctgccgtaatagtcaaatctgttaaagaattttgaacgtgggatagacccgcggctaattgatccaaatcaatgatatcggtgacatattcatcttgaagatctcgccgaaagtaccaatcccatttcaattttcgaaggtttggggtgattgatagtacttgggcgagaggcccctcacgtagcattgtcaaatcgagcgatacgagtttggatgcgtttggtagggttttcccgggccatttgaaagttggcgggttatcaaccaagacccttatccgttcaacagacggtaggtagaagagagggaggacatctgcagtatttctagcgtctgtatacttgcgtatgaagaagccaacgccgggaaatatagcctcgacatcttggagatatgaaaaggaattgagatgactatttttctcacagagggccgaacgaagcatcatacccataaggcgactctctcgggtgaagttttggctgagctggagagatttcagacatcggagctgtgataataagagtgacatgaacgcgtccactgttccggcgcgtaactcttggatccattcactggcaaatgaaacggagagattttcgatacagttcacgagcccatccaaaggaacttcaccaagtggaagtttcggactacttatcttgtagtcatagaagtattcatcgaagctatccccactaaggattagaacatgaatagaacttgcgagctcgggccttcgcacgatattatgcaaaaactgagcgatcggaggggtttgagattttgtccatgtcaattcgacgcgattgtagagaaatgactcagcaaccgcgcgcaagtccctatgcgtaagagatagtgcgtagagatcgctgcgcgataaagttgcaaatacgaggcgcaacagctctgtagggatggtgagaatagaggccgccatttgatgatttccgactgctatttcaaagagcccaagagtgatatctcgttgcctgttacaagtagggtgtagccctaagtactctagacccaatcaggaaacgacgacatacttctgtatgatcagctattcccccataaaagcggcggcagctaaaataggaaagccccaccctacgaagacccatagcgctcagggttcaaaactcctttcccacccggcagatagagtcacctatatcttatacttggggatattatgtccattgatctaagttgttaacactgattctcttatatgcacatgagaacgaatcaatcttatcgcaaaaaaaccacaaaatgccaagttcacgcataggatgcccagcctatttaaaattagtaaagcgtgatggtgaaattggcgcaaaggaaagagtatacataccgcaatacaacacagcaaggttcttctcatcacttgcctgctgaaccaattcattgacagtagccgtgacactgagggttttgctcagttttttcgccaccactgtcaacgcacggtcagcttcactaggttcattctcgttcccactctttgagacgagaccatcagctgccccaggcagagctgcaggcccatcactggcttgtttgtcctgcatttgcattttcttcacccgaaatggggagacagtccagctatacaacgggtcataccgtaatacatcgaggatcgtcattatgctgtacgattcttgccgaagtgcttcaagggtaaattcacaacaacgccggaaaacgccctcagtcttggtgataccgaatccatcgactacgtcgcgcgtcaaccggaacggtacaacttcaggaacaggaagcacacgtccttgttcgaacgctacaccgagatcaatgtgcactacttccccggtcttctcatctagtagaatattatgtccgtgacgatcgccgagtccgagaacatgaccgaggatagagattgcagcggtgcttcgtgtgtaggctaaccgcttgctaaaccagtcgtctggattgttgaacttctccatgaagaaatacttcaagactgggtggaagtggtcagtcacctgtcggtaggttctgatgcgttgctcaaaagatttagtctgtacatcggcaatgtgtttccggcaagagttgggtttcatgtccttcgggaagtatttctgatgtgctggcatcaggtagtcgtgcagaggaatagtgttcggaacgaactcaatgattcctgcactgggtgtcaatggaagaaccttgtatgttcggatgcctaggctccgctggcgtgtaggttgatggtctttcaaaagactgctgacttgctcaaatacttgctccatgatggcatcttgccgcaggtcatcatttcctcccttgaactattgctttgttagtttaagaacgtcgacggacttcaaaaaaatagaaagcttactaattgcttgtagcacttgccgtcggatgcagaggcggacaaaatttttggtgcgctaacgccggaagcaatcgtgaactctgagtagaatcttgtgattgtaggaacgtgactataatcgcaatctgcacggaggctgattttcattgtcggtggtggtagtttgtaagtgaccgcatcttgtccaaggcgttggccagtagtcaagcttcccagtgggaccttagcaccacttttgtatttgccgtctaatttatcgattgcaaatcgcacatagctgatgttcacattgtgcacagcaatccaagtctgaccaatgtgactatcgttctttagacgatccacaagctgatttgcggcacggaaacgcgagtgagacgactgatctttccctcccttggacttgctgctagcgaaaatttggtacatgccatggaaaggatgctcaacacatatcctgtataccaattgagtgagtaatgcttggaaatcatcggagacatcgagtaggcgagatgatagctgattcatcaatggtgcaaattttcggctaggaactccgtccagataccgagagacagctgaatttgcagtctcattatctgattcatcaagccagagtgcacagaaacgtagagcatcattgttgtaagtatcgctttccctcaaactgagaaggtaattttcgaggcactgctgtaggaaagcctcccgactttgcaacaaacgttgatattcgcggtcgtcaaggtcgaaccattgctttgccttggcccgataattcttcaagtattctctctccttgcctgtggcattcttcatcatgtcttccaggccaaggacttctttctccttgcggtcacgcagttgttccactctcttgaaatcttcgaatccatcagggtttagtagttgttgatcacaaaatgttgcaaagccgtgatagacacgtccagcttcttctccgtcggagtttcctttcaattccttgaccgcgggatataggtactcttgtagaattgagtcgggcttttccaagcgcgcctcggcaacgtggtgaccctaaacatgatattagcacttcggatagaaaggactttttggaaagactccctttaggagtctttcaaggactcttctaagaccaacttaccaaagtcactagaagttcagcccgactgagggggattgactgtttatgaaggtcattctggcccttcagttgctggagcatgcgaatggacgcggtcatctctccttgatcccacagaacgttggcaagatcgaattttgcagctccgtcaatgttcattcctaacgctgcgcacggttcggcaagcttcgaaaggctcattgcagatttgagcgatgcctgggagataccatgagttcttgtgatttccaaggattgtcgaatgactttcgcttctagaagtcgcgaatttccgagactcagatttgcccgtgatttgaggatgtcatttttcctgactgaggagaacaacgcctcatgccaagacaagatttctccaacttcatgatagctgctctagtcagtacatatcttgtaaatggttttgccaagggaaacacgcacctctcggttttcaaccaattgcttctcgccatgatattttgccactcttcctccacattctcggaaaacgcggagtgcaaagtgtcgctgatttcagttataattcccaacgcgcgcattgagcttcgcaactgaatagcagacccactggtcttgagaagagaacccagtgttgtcaacagaccactttcaattgagccattgacctcgagcagagaacccgaggtattgagactttggaatgtacggaatacagtcgcagatggggaagaatccgaaggcgatactggaatatcccatttttgaagattagttgcagcttgcaacatgctgtcaaaggcaacaggggcgtcgtttgcactgccggacgcagagagcatcgtattggcaatgccctggaggttggtagcatttaaagccttcaacacgccatatgattctgcattgtcagacatctgaatttcactgtcatattttgcactctggaataagagatttttgaacccggagctttcgtactctagccgttccatgacactgctcaaagatgagctctgctgaatgccatagaacaagtccggatcatcgatgtttttgaaaacatcatgcagaaaagcaggcggtggctcgtatctaacgacagatgagcgacgagatgtggaaacaacctgggatgtttgtatttccaggaaaagaagcgaagtcttatgcaaaccgcagcgatgtgcagctaaagatgcctctctgaagtcaatatcaagccatttgtcccgctggactatagttgattcatctggcacgggttggtttcgaaggtagagaatgcagtcgatcacaagctgagcgtgaggtaatgtttcctcgccaatctcacagagtacccgccgaaaagtagcagatatgtcttctcggaccttcccatttttgtctttatcatccttctctgactgcaaaacatcgtgaaccacgtatggcaacaactgcgctgctaagccaggagtcacgttgagaatttcgcgaagagagccaatgactgggtcttctggagcagcattagataagaacagggaaacattgcgagcccagtcagcaaccgacagcccggagacgctggttgctgcattttcacatctctcctgctccgagtttgaaagcaaaatggtgggacatgtgtatgggtcccagacgagggcaccaagcagagatatgggaatcaccctgctacaaccttcgtaatctggataatcatcgaccttgcttacgatcagccgcaaagtacgctcaatcaggccagcttcaaaatgcttttgcacgtccagcatttcgcaaagtaccatgagaattcgggccttagaatgacagaaaatatccttaggcaatggataagactcgttccattcaaatagtgagagatcctgttctcgcaggagcaattgatcgattttcccagtggcagcaaaggatcttccaatgacctgagcggcccaaagtcgatattgagggcctccattggagttttgaagtgtgtgccataaagatacaacatgggaagcgggatccacgccttcatttgacacccaattcccagtgtcggatgcctgctcgaattggggacataggagcgacagaataagatctgccagaggcttgctcaacagcgcagcccctttagagtcgaggtctttgagaattgcaaagaccaagtccttcccaacctgtccgaccaaagagtcctcacaagttgagaatttctcagcttgtgaaacaagccgatcaaatgatatttttggcacttcatggaaaagatgatcggaacggacctccttaataaactcaaccagccattggtggaatctttttgcatttgactgcactgttctgtactgactctcctgagtcgtgttctcaggtaacgacgaaaatattccgcggagagtaaccattgtcgagacagcgatacctgcagagaaatcgggtgcagataagaggtatcctttccctgcctcgagtagataccagaaaaccccaagagcatcctcagaacaatgaatgtcgctaaggaaaggccgcaaggagctgagtgtcatctctagaggataatcttgaagtatgacgggaccagccacacagattaagattcttattttgcggatcacagaacaagcatgaagcgaaccgagggcgggatgtatggattcaagcagcgagcggcagacaaaagacgcaagtgatggcgtccatattgattcaaattcaaatccagtgcgtctgcaaagaaactcaatttcatccaggagatagcgtgtccgaaaggagggttgttgatttgctgggagtgcattttgagatgcactcttgttgattatttgtgtctgaatgtcgagcgcataaccgaagttttcacgctttgagaatgctcgttcgatctggtcatagtagtcgagagagttgaaaaaagtcgcaatgattagggggaattgactctcaatttgtgtcatgaactggtctgccccgagaagttttcgcagacggatttcaacccccttgggctggctaccttgccccggaggagtactgatatctcgtgcaatgctgtatgcctcagctttgtagaaagaggtcaccaagagctcgagatgtggaatctggaggtattttgcaagctcaattgtttcctgttccttggcacgcatcatcatttgcccaacgatttcatctttgacgtccatcaacatatcctgaaggctgtcataccgaaatatactaaatggcatagacatgatactctgtgtctctgtccatgtgtagagtatttgcgacgagaaaagccgaaaaagttgtttcgcgtcttgcagaccgagggtctgcgaaacggagaccatacatctctcggcataccacagtgacattggaacttgagctggggtttcaaatagatggtagatacttctccgcagcaaagtatgccatctagaagccaaccgagaaagcacaaaaaggcggactgcaattccttcgatccatccagggtctcgtggcaagctctccaatacatcatcaaagatggcatcgtggtctttgagaaggaaccgctcaaataaagcagggataaatttcgcaacgctgaatttgacttgaacatcaccttctcgaaggattgtgaataaacttgttcgtggcgacggaagagactgctcattgccatatgaggggcatgtaccaatcaccccctggatgagctcggctaaggcgatgtagacctttggtgtagctcttttccgggccagaagcacttccataaaccaattgtacaagtccatagccgattctttcaaggtatcgtcaaggcctttcgtccaggagccgacaaagctggtcatcatgcggatgcaaacgcaatgtgaagcctcacaccgctccatttcataagactgtagacaattttcacctaaattttccaggatgcagagcagttttgagggctccgattccgagcagagtttgaagatttcaggtaagatagcttgggccgccaagatatcggcttcatctaagcctgccaggtattcaacgacagaggacgagtcagaatctgcttgggttctaaggaataccgagagttggatggttagacagcgttggtatgtgacggggtcaaggaagatagacagagaatttcggttcaaggtaagaatagtgtcatcaatggctattgggggttcggccatgaatcggtcatccacatccataaaatcttcggctgcagatggactttttgagttctggcggaaatactcgagcgtttttgcaagtggagtgacaagttctttaagactagtctggatggcagcgggggtgtcagaactcgttaaaggatcgaggagcggtgacaacaagtctaagcaagattgcatgaaagcggattcgtgtgtatgagctgccagaaaatcgcatatagcgttccacagactccgacagttctggtgcagatcttgtgatcgaggttgagattgcaatgatggaggaagacatgccatgaagagggaaaccacaacacaaaaggacgccagaatctggaagttatccggagtgatatgtgatttttcttcattcatagcgtgccacgtttgtaaaaacgagtcagatctcactcgaaacagatctaagatcgctatatcatcagggtcttgcctagagaattgctccaaggaccatgtttcctgcagactccaggggtttgctggagcaaaattcgtatcaaaaatgtaccccaacaatttgcggttctcgtggaaaaagagccaagtgcgacctatatgccccgttggtcctgtgacttgataacgaggaatggcgaaggatcgattagtgcacgacagaaaaaggtccagtaagtccaaaggacgagcatacgcagcaactcgagctgtctggattcgatcagttaccgaacctgcaaagtgactgtcagccagaaaccgcgaaaggaaaattttagggcctcgtaccggcccaaacttctcttagccagctacatatctgtatcgaggcctgctgggccgacctgggatcaagctgtgtcctcattcgtgcaattgaggcccatagccttaaagacgtgtctgagatagcagatggtccattgacagatgtcaaaagtgaccgcgttgtctccatagctactgagtaatccaataagtctgactgcaaaatcatactcactaggttacacgcagctcgagatgtcaccggagatgagaatgcacgcgtagtaaattcgactactcgtggccagtggaccctaattctaggtgatttggcagtagccccgttcgcaatactattgtcatagtcaatttagggcctttcttcctatcctttctagatgcatttccgaatttacgtaccttgtcagagcaaccattgtccaggatgatacagcaccattaccgccagagatgttcaggacaagctgcttgaagaagggctccttcgtctcgatgtcaacctcagattcgaggaatgggatgagttgcaatgcacatattctttttgtgcctgtggctgagaccgaatctcgaaatacgtcctggatctcagaactgaagcgctgccttttgcttgaggcttcgcgtgctgacccagacttgactcgggtgtgaatacactccgagagctttaatagctctgcaatcaaccagaggactgtccagtcatgctctgatctagcagttccgaagcaaggtccatatactggtctggtccggcatgcttcattgcgataaagtgtcgtttcatcaatttgcatgatctccttttctgcccgtctcacgtattcggaatggagtgtactggctaatccctcgatatcatgtgccagagattccgacgggtcttttcgagcagtgtccacgaagacgatcattgacagcatcaaagtggcaagtaactcttctttgagaatctgtaccttagtggcccataggcgtcgaattactggaaccaggcctgacaggaccaaacggacaagttcggattgatcaaacatgacttttgtaacgactgcatttatgctattgaacgcgagctggtgtgtattcccagccacagatgactcaacaaactccgaaagtccgtgaagtatgctttgagccgtagtgtgaagaggagggtttgtgcttgttgtcaacagttgaatacagatcacaacttcttcaatgacatttctattgccactgtgcctttccctgctgactgagacgggcgcgacggtcattcttgagggggtagaacggctgtcactggcatcttggtcttcgggaacgaaacgataaccgcttcgaatactcaattgactctcttcattctcccggggactaatactggcaaggcaaaagctcataagggctttccagtcttcttcgtcaagatgctcggcatgagggcggtaacgtagaagggatgctaaacatttggtatagtctaggcttaggggttcccacagaccttccccagggaccggtagagtctcagtaatgtggtccacaatagcgcggacggttctgattcgcaaatttttcaaaaagaggccaacagccattcggagtacggaagcacatgtcgagagccgcgacgcagaaggagtttttgtgggcttttgggctcgattgtatattgacctctctgctgcgacaaaacggaatagcgattcaaagatcttgtggcaagctttgtcattgagtgtttgtctaggtgtggaagattggttagttactttaatagcctgaagtgttcatttggggtagttgactacttacagcttggagctcttcttgttctgctgtaatatgtgcttcaagtctgtcaattgagttagcgccagttatttctgagatgagataagatataaagcaacctgccaaaccatccgagcgggccttctgtttgtctgatgagagcaggctaatcgttttgtcgagaaagatctcccccatcgcgtcttttttcggggtcttttctcgacataaaacacatcaaagccttgagtctcaacaaatcttctcgcacctgacaagaaaagacatatcagatcaatcagccagtctgcgagctaatgatcgagtcgataagcgaagtgattgtgtttagtggaaagtggagtggcagtatttgcgaaagctgtctaccgcccgatttttgtcgcgttccgcctttctagactctggaacaaacatagagctcgagcttcacttctcaacttcaccccgccgtcatggcagagctccaagatacccggaatggcctccgtggtctgtatcaggatctctcggctctttcgaactctcaactccccaacgtcgatcgcttgtgtttcgaattggagacccatattcaagacttccgcaaactcctagacaagccagcaaagaacaatgccagccgccaagctgttctctcaggtaagtagccacttggtatcttggctacctcgcaaccctttattcgtctgttttgacaagttactaacgtcgaacgcgatatcctagggaagatcactgttgccgacgtcgaatactcggtgaaccaggatttccaacaaggcgcactgcaacttgcagatgcgctcaacatcgatgaactcgaggcagcagttatgtttctgaccgctcaggaaaattcacaagtgttggacaggcccccgttgatcgctgcgataataagcttccacgagcgtcgcctttttaccctcgagtgtctacgtctcatcttccgagaatcgcgcgaaattgaacatgaagcgacccaccctatcatgcacgaaacactggcccacgttctggaaattaaaaacagccctttgcggaatgcctccctcttcgcgcggaaagccttgagttctatggccgacatccagaaatggctgtcgcttcttggagatcaagttcaaaaggcctcagtcgttggccaggaaaatgaccgcgatatcatggaagccattgaattccaacgcacaagtctgcaacagcagcatgagtcactcggagcgatcctattctatatgttcaaggggacatacacaagctgcgaagacttccgcatacttgtgagtcagttaaaaaaaattgatcgcttcgacggactcttgtttcactacattccagtcacaattgtgtcttttgtacagcacggttctcccgagggctctggatctgagaaagaggcacgagacctgcataaattaatcactacatccaaggatggccaaggctggaagctatcaaatttccacgctgcccttgttgctctgtggctgtcagtctacagtggatggtactttgatggtcttccatctccatcagtcgacgcagagaaagaatccgaagagcgtacgaagctgttcatgtcttctctcgacgatggcgcccttgattttatgctcgcaatctgctccagtgtcaacaccgaggaatgggcggaccccgcgcggagcgaattagtgacattactgctcagggaaagtgtggtatcattgcctgatcccgaaccatgctctagctttatgaaggagcttttaatggaaaaccttgaggttttcgtggaatcatgcgttgcaaatatgcccgacgcggtgcgacgactgaagtcggaggaggactcacaacgactagaccagatcaccgcactcagagatggcctcacctctaacctccaccgtggcttggtagaggtgcggactcaccttgaatcccttcttatgatcatttcatttgcatttgagcaccgacaagaagccgcccaagagttttgggctgatcctgatgggaatctctatggcttccttcagtgggcgtctaaacgacagactgttcctcgggtcagtgctttttgcgaaatgctgtgttcgatatccgaaggagaagaaaatgcagctgcggcacatcgatttctgtcggaggaagataagtttatgtcttccaagttcaagcgatccacaaccatgaactggtcgcaaatgttcgctgaactgaagctttacgcgtctcgggtcactgagaagccttccactactacaagcccccaaggggcgccagggatctttcgtccacggaaaccagagcccgtggaaatgaacgagcctgaaagcccagtgatgctgacatgttaccttcggctgataggccacttgtgtaagcagagtcgacctatccgagagtggatgctgcaaaatgaatccttcaatgtagttagcacactgctagacctgtgcagtgggccgattccatcgcatcttcgagcaactacctttttaactctctcagcattgatgactgacaaatgctcccccgttggaaaggaaacgtgggcccgtctcgatgggtggctatcgggaggaacaggtgcgtccggaattggcaaagttcctttggtttccaaccctgccgtttggcaccagcaacaagccttgcaaaagatcggggagagctttgaccagacgaatgcatttgttgttcttatcaatgcacttactgctccttcgtccgactcaattgacgacccaatgtcgttgcctttcccggagaccctaggtggaacttatcgcatgtccgggattgagccttacatcgatttcatcttggggcatgccttttcgcggaagattcaagagcttaatgaatatcagtcccgcctgttgaacttcaactgtctagacttcgttgtggcaagcttaaaatccttcaatgaagacctagtgttacttctgagtcagccatccatgtccgattccccgacgcagacttcatcgctgctcacctacgttcgtttgcacccgtttgcacgcgtggtagactggctttttaacgaagatgtactcaaatctttgtttgcaacgtctaaacaagacgtttcggacgttgctaccgcgtcgcccgactctgttctggttctaactttgcaccggagtctggaggttatgaacttactcgtggacctgcaatcgacatactttaacattgtcaaacctctggtgcattcccagcccgtaccttcccggaccatcgtggcaaactcctcgctagcttcatttgaggacaccgtgctgaacaatctgacactcatcccgtcactctgtctctattgcggcacagcgcatgaacaactcaccgtcatttccatggctttgctggaaaagcttactagttccagaaagctcaacaagatgacttcgccagaactcgtcaagtggcaatcttcgaacaagattgtagaggtgcttgcatccgaggtcgatgtggacagcatatcgctgcctcttgtgttacaaatggaaccagatattagagagcttgatttcggcccgaatgctgctggctatgtcattcgggaaagccttcttgctctgttgaacacctgcctgggaacgatcacagaccgcccaacggtagcccatctgctgctgggcttcgactgcgtgggcaacatcctcgatgtgtcatcggaagggctattcgcgaatcaaagttccttgctgcatgccattgtgaatttcctgaaggcttatccggagatcctcgatggtggcattatatcttgggtagtgcacctcaaacgtatggcttttgaagtgctgaagcatctatggtcatcgaagctggcaagttactacacccttggtgaaatgcgtgctcaggcattcctgcgtgagatgtttgcctaccaaccgatcattggcccgagcactgcctggaatggattccccattgattcagatgaattttggctcacagacgctgccactgccttagcagaattcctgctttaccggagtcatctcttcacatatgccgcaaccgaggttcgctcgacagcaaaggctagatcaccagctctacatgcccaaattctttcagtgttgcttggaaatacgcttgcggataacggtgaaccgttatctagtccttccgtgttcgatcttttcgatttcgcagaccttgatgttgggcgcgagttcaacatgccccagctttacttgctcggtgatgttgctctccaattagaaagcaagcgggaggagggcgtgtacagtatggaaggggtagaggagatgatacaaatgcggaaagcagaactcacggccaatggaccgctccgcccacatgatgaggagcagttgctagctgaggctaatgacctgaagttgttcatccttgcaacgaagcaaaacagcctgattcaaatcaatcgctatcacgccctccgttcatgggtagagctcgttgctacgatgatcacttgctcttctatcgacgaaggaagcaggccggctttcattctacattcaatccaattgattctacctaagctcacaacggcaatcgaggcggatcttcccgaagcacttgaactggcacgactggctgaattgttgatcggtagacttgcgtccgagccatctgcaacagatgcgtctcgaagcggggatgtcatcgacgaaaagctccaccagctctttcaactctgcatccggggtaccaacctggcgacaggaaatgtgttgttgagagaaacgctttacagtatttgttcccactacataacacgcatcacatcgtcggacaagggccatgaaaacctacgacgtcttagccaacatgtcatcaaagcagccggttctagcctgattgagactatgtgcgatgacgcatatactggtcaagagtcgtgccgtgcatccgctcttgtgctattgaacagtttagctgttctggatcgccaaactgactgtgttttggctgagttcatctcgaggtcgaactatttgagtctattcctggatgccttgcgttctcttcccctcgaacttcacaatgctcagggaagcggtcagtcatacccccttcgaaacagtcatattattacaactaatcaaaactcaagacaccccggcactactggcatactatgagtcgcttttatcattacttcagcggctgtctcaaactaagggtggagcaaattgtgtgctcaactctggtcttttccaagccgtgcacgaatcacgacttttcgctgccgatccagacatcggcattggttagtcaatcatatcctggcccaattgtaccttgctaaccccctcagacattgaaaatcccgacgccctccagaggtattacgatcttctcctttcagtccttcaggtcatcgtgtatgcggttttctctcgaggtatccacaacgaacaaattaaagagcagacccgcatttttttggctgaaaatcggccatgcatggtgggtatcttcaaacgatctgccaagatcggaaatacatcaaccgcccaccacgagactctatgtgaattagttaagactttcatggctcttgttactgccacagatttcatagaggtatgttttctcttcttttcattttttgcaatctattgggtcgaatccgggatcatgtgactgactgagtgtagttcgaggaccaggaagtccaacatatcgcccgaccagcgttgttctcatgagcctttgtccactgatgctcactagggaattgagaagaaatgcatgtatcattatgacccggtggagtgcaggcggttcccaggttgagcgattttaccttgaattcatttgcatcacatctaattcgtcatgtgtaagacgtccgcccatttcgatatctcggccttatgatggctatctttcgtaggaatgagtgctatgttcgctcttgcaaagtaacaaagtcagcactcgagttctgggtcgagcggctatgtttcccagacggagaagctatccgtgggggcgtacctagaaaatccacacccagaatctcgcaatgaagctttgggcgcatctccaaaggtcatgacgatagttctttgggaccattggtctctataagattcatgaaacaatccgatatttgagggggcctgtctcggttactgatctaaggggacaattccatagagtatattcgagtcttactgtatatgatcgacgagattagaaatcggagaaaataatatcataatatccatataagtataacaaccacgcaactgcaactttgatacatttgtagggtgcattcgccagtcttttctagtgtcttctgtgctatcttgttggatgtcttttttgattggggttttttccatctcttagctatcatagagagtgtgacagacacaaaacagccgtagacgagtatacttttccattgaaaggaggatggttcagtcccatgtataacctagccctaactctcgccaatttgatagacccgagttaggtgtacacgtgtatgatcctgaggtacaaattgatctggcatatacatgtgatgtggtattgcactagtagtatgtagtcgtgatatcatggatgctcctgccttggtgaggttggtgagtttctagattgcttgcccagctggtttccatagccaccatccacgatcgtaccttcctgtaaaacttcagcttctgtttaccaacctcatcgtaccttcctgttgctattgtctgttgctagggaatcccccaaatgttatatatttgctccctccactgtttttcttttctctttctcctctccccatgccactggctatttttcatttgcacttgctcttgattaccaaaaccatttcttattgctttcaaagctattcaaaatgcacccctctacctttggtaaacgggttccctcttctcgcatcctgctttctaaaaaccgccctcctcctctgaagtcatgccttgccgcagcggactctgatcgggactcccccccctctggagagccttgcgtccggaagacagtacacttccccgacgacaagtgcttcctcgaacgggtcagggaaatcccgtgtcgaccaaatcggaacaagaaggaactcttcaaaagtggccggctcgcggagacgaagtcattcatcatgtacacttcgaatcctctgggctccaaccagaggttcctctccaagcatcctggaggtagtgggcctcagtacgccacgcagtccccatgggtcagcgttgtacgtgcccgttacctcgctgcgaggtattcgtctgccccacgtgctccgcagtccacaccttcctccgatggagatgtttcagcgcacgagtcttcctttgatatgtcttcactggaggatgccctgcttgagcctacccccagtagctcactgcatgagtcttccttcgacatgtcctccgtgagtcatgcgctgcctgatcctgacgtgactttcgacatgtcctctttggccgatagcctgcctgacaagagtgccttcaatatggcttcgctgatggatgccctgcctaaggttcccccccccggttcaccagatggggttacctctgacatgtcctccctgatgcgtgcactccccgactttgatgctccctctgttgcatcgtcccttgcacgtgcccccaagtccatggctgcgacccactctcgcgagtctcgcaagctagctccaaaggttcatgcgcgtgtggttcagacccgcgtcgtccaggttggcccgttctctgccacctgtttcatcaacctttgtgggctcatggttttgttgggctcgttcttcccatgccttgccccagcattttatgctgcgcttgtgctcctctttatctatgggacgtgcttcttttgatgctgacggtctgcactcatgtcctcagagcgctcggcgggcttggcttcctcttccttcctcttccttctcctttttgttattgttgctttctgggtctgctttcttggcgttttgtttttttctgttgaggcttttgccgtttgattttgcgaaaataaaaaacccccaaaaagattgctttctgtgtctgttcgttggcgttgttggcgttggtgtttttgaattccttttcttgttttgaggtaaggacttggagacatgggggcgacgtctctgtctgtgatcgcgaggaaggcagcagagcgtgtggtggcttcatcttttgtctttcaaggtaaatgatcccactcctcctgtcttttatattattctaacaccacgtcttccagggaggatactggcgaacgtctctgtctgtgaacgtgcggaaggcagcagagcgtgtggtggctcaattggatggcaactatggtcagcccttgtcaaacatctggtgtattcaagagctaacatcacgatcaatttcaggtggttaatgggcattgccatcgaccgaacgtctctgtctacggagagcagcagagcgtgtgctgacttgcttccccccctttaccccactactttcagaaacagcatggttgaactgcaaagtcttcctgcttcgtgtgctgacatcttatagctcggtcaaacgtctctgtctgtgaacatgcggaaggcaacaggacgtatggtggctttgtcttttttcttccaaggtgaatatgtttccacctcgtcgctcttcgttttgactacatactaaccgcatattttcctagggagggcttcggggacatctctgtctgtgaacgtgcggaaggcagcagagcgtgtggtggcttcgtcgtttttcttcaagggtaaatatgatcccactcctcctgtcttctatcttatgctaacaccacgtcttctagggtggatactggcgaacgtctctgtctgtgaacgtgcgaaaggcagcataacgtgtggtggctcgccaaaaagggcgaaaggagtatgttttatacctctgcccatggatttctgtggttgtgctaactgacttagtagtgcccgatggtgtccttctacctctttccttttttccttcttttttcaccatgtgttctcgcagtgcgaggggtatggagaagaaaaaaatgaagtagaagccgagtacatacgtatgttcaaacagtctgtgcgtgtatcaagtacaatcctagaatgtattatgcgtgatcacttggagtcacaatggacttcatgctttggcctttagggtcctttttttcgttatacagtactagtgaaccataggagtccggtattgcgcgagggctcggaatatgaagcgggggtgattcttgcgagcaggctgaaatcatttcttgtcagagacctggggggtgcgagggtatcatgaaatgcatcaattagccaatctttccagccctgctgtacagaatatcttgaaactggtatcactaccaactctaacgcatgcctgccactcctactccctcggacccagcacaaaactgaactccttcaaaaccggcgaacgcttccaccttgcaaagagctgcccattctccaccaagatctgccgtagcacctcccccctctccacctctgtagcaggccatacaccctcccataccatcacatatggctccacgaccccaaagacctcccttagccacctccatgccctcccctcctcaatcctcccagccagcaccatcccccgctctagttcctccagaaaaatatccctctctcgcctctcaaccgcagcccgcatcaccccaagaaacatatacgaccgcactgcaaagtccaactcacccacctccgccttcacgcccatcgtctcctccactgcaacagcagctaaaaactttacctcctcctcactcccaacctctccctcccaccccctacaccatgcgtacgaccccaccccaccatccggcaacccacaccacatcacctcactctcccacacgccatccacatccggctcagcaacctccctcctcgccgcactcgcctcccacagctgcgctgagtactttgcttcccacgcatacaaatcatacgctccctgcgcgaccagtatgccgaagatattcgggccccacacttcccgggaaactgccttggctgagccagaccggccaggggaaccgagccccatatactcaagccagaagcgcgcttgcgtctccgagtagggcggcacgctagtgtagaccgtgcgcaggcgcgtgatggtcgtctcgagtgtgctgagggctaatccagtgagagtcgcgagcgggagggacagctgcctgcggtgcgtgcacacgacactgtgggcccagcggggtagtttcgtggcgtgtgcgggggctcgctggcgcggcagccccagcggggagtcagagtcaggtaagtcttggaggtcaggtaggcggtagaagcgcgctgtggtgcgctgggtaaggaaggcagtggagtaataagagcgccatgcggaggagtggaggagggcgtggtgtgtggtgtagaaagactggaaatcatcaggggaggggaagtcaccctcaagttggttggtggagcggtagatggccgctgcgagctgggcgaggtagaatatatccagggtgctgtgatttatcagtctttgtacttgtagtatagttcatatccttgaaacttaccgattaaacctcaactcgcccgcgccgaacgaccatccacgcgcgtgcagcttctcgacaacatcaaagacgccactgtcgagccacagctcctcttccatatagatgaatgctatccgcagcactttctcgtggcagtccaccggcaccacgccgccttcgacgtcaacgaggaattctttagcgctcatggcgaaccctctgataagtaactgatgatgatggtggaatataaacaagatcctcaatcggtatgccaggggtcaggatgcaagtaagagctggtgatcgatgttgttaagtctaagcatattgaagctaccatagccatgagccacggcagaaaaaaaggagtcacagccgcggggcctgtacgaaaaggaattgggatgaaaatcatgtatacccccgggacgaagaattggtcgagaagagaatgagattttttttaaaagcgtatatcggattttgttcagttataatgtattccacgtgctcatacaaatagcatgatcggtatttcggggaagcttatcacttagggctaattgtcacaaagccgattccgagacccgaaatctgccatgtcatgttgcgtttgtcttttgcgggcgacattagtctacatgcagacttataagttagctttttgctattgccgggatggaagcggatatttttatcaatatcaatattattagccgatggtcctcttcagctctcgagactcgaatgtcgaggattgacatacgggactacagctacatcagaaagaaaagaatgcaaggaatgaaagcaaagcatattagaagaatattcgagactaccactaaggcgaaaatttaatctgtaacaaactcgtgatgcaagaaagcgccatcataacaccaacccatgacaacaataagagaagacggcacgaactcgcaataccactaacaagatcaagtagatgtttatgtatgttgcaagaaggggaatagttgtaatgagacaacccgcaaagcccggccagctgagaaagaactctatacaagtcgtgacgtgtaaatgcgctgaaacagatccagagaggtgtaaagggtgtgtgtgcgtgaggttacggggggagggtatgagacgccagaaaccggaatggatacaagctccagtgcgagatatgagataatcaaacgctcaacggatcgaaggatagcaagaaagatgaagatttaggatgggtgggtggatcatggactggggggaaaagagaaatatgccatgcagaatgacaaactcagatatccgacgaatggactacggtggtgtaggggtttggccgaactctgcgtggtcgtgaggcttattgcgggatcgcatatacatggcatcggaggccgcgtcggccgccggagaatcgatcgcgcggggaagactcctgtgctgttgctgttgttgggtcacaacctctcgtgcgtagaactccaccagcattgtcccatacgactctagttcttcgacggtgatggcgagtcggaagtcattcagaaggaggaattgtagttccaagtggttgagctccaccagtggaagaccgccaacctgtatatccgatcatgattaattgtgatccacgactcagatataagaatcaaatacctttgcatatcgcgaattggtgtagaaaacatcagagaagaacttgctggcacaggtcacggcagcaatgaccagtcgatggatattaaaactatcaacgacaaagaaatgtgaaagtgcctcggcatccgactgaggtgaaagggtaggtgaaattgtaggattcgacccttgcgggtcctgcgcagtaaagcctgttgatgagggcgggggggtcgccattaaagaatcctgcgcctgatggaccccaggagattcagtagatgcggacgaagatcctgattcttcggcagaattccaacggtggtgcagctggtcgatctgatcacggttgaccagctcggtcatgcggtcgaagtagaccagcaagcttagaaagacttcgtaggtagtagggcaatatttgtggatgcgagtcaagtaactcaagatggtgatggtcgggacattcttgccgtgaaatgcgagtacgctggtagcctgtgggctaaggttggatgtgccctcgggcggcgggatatggcgatgtacatgttcatgatgcatatcgtttgtagtcgtgatcttggtcagaagcccagcgaccatctcgataatctccgtgaccggcatggagctaatctcatattgtcggtggtgcgatccagttccgggagtgtgtgagctccgtgatctcatcaggtcctcactagcgagactctgaatatgggataagctttggacgcgaatgcgactcggcgaactggcttcggaacctggcacagactgcatggactggtaggtgggttggagacgcggtgaatccggcgctgaccgattagaagagtatgagttgctcccagtctgggttggtggggtacgtgttgagtgagagtccggaggaaatgcatggctcggatgagacgtcatcgagggcggtcgtggtatgaagataggagtatcggaagaagcgcgggaagcttgagaaggtgtgtatgggtcgatgtaagccggcacatcattcgcatgcacaggaagccgagcagagcctatggacggtggggcagtagaggtgggggtggaggaggaagtcgagtgagtgtccattggctgggcgaaagaataaactgaatccgaattgattgcgcctcccaacgtgtcgatatgatccgacggcacgtggttgacgacgacggagcccatgtcaaggctatcgtggtctgtttttctgcgggaacacgggtcagcaaggcggtcgcagctcgggctgtgttgccactataaaccgatgggagatcagatgggaagaatcgaaaatgatatatggcaataccaaggaatggagagataaagagagggggttgaatacactttcgactaccacaagggctagaccacagatcagggaaaaatccccggttcaagacgagagagagagggaggtgggagatcagcgacagccgatcgaatccattgaaaataaaataaaaaggtaacaggcgaaagcgaagagaagaacaggaatagcaggaatactaacaggaataacaggggaaactaacgcgtaagtaatatgggaagttggggaagtggagggagtttgggtcaaggtgagatcagtgaggtcagtgtggtcccccggagacatatgaaacaggattaagacattgaacatgggctttataattgctgtttagactaaatatgatataaagactcttctcaagactgttacacacctttcactacaaagactcttaagagtcttcaaagagattatcgccgtactcatcaaacatataaaagacggtgtacaatgatgtagagctataggctgtatattgacgaatgatagaaggatctgcatccccgtggacaagtggtgattcagacatcggaaatgtcttagccctatttaccctcgccggaagggtaatacgagaaggaatctatatgaatgtggatatttcccgtatagaccatatgttgtacatctccctttgtccggccatagacttgcattacataggagcatgacagtttgtctgcatgtgggatgtgacctgttctgcctatggatctcccaaagtctgggcagtactgttctacagagtattacagtaccagatcactcatgcgatttggtaataggccaagatatataaatctggggttctccccggtctattcaagtaactataccactcggcagttatgacccaatagccagctggccgagcacttccgatcgagtccttgagctgctcggtccttttctccctacatagcccgataaaggtggggggtatagcagcacccgtacccgtggactagtgtcagacttgtcatattggctctcagacacagtatatccccggtgggggcgcatagctaaatgcgaaaaccggagaactgggatcatgaaaccatttcattggagattgacacaatattagatcacttattaattcgtcactcccggcccagtgtagccgttgtctggcaggtagagatgtctcacggcaccggccttggtcaggaccacgagacgaatgacaccaccggagctgccgtcccatttgatcgcctcctgcaaagcacttcgcacgaaatcgatgccctcttcctccgtcatctgttcccgccagtgggcatcggtataaccgtagatgtaggtcgagcccgaaccgccgatagcgaacgactgcttgtgaagggatcctcctagcggtatcgagtacacctgacctccgtgtcgtgcatcccatccggcaagaatgatacccgcactatgattcattagcattggatttggaacaaatgccgatgatccaaagactcgggtacagacctcagcgcgtccttgttctcataacacaattcctggaagagtgatgcggcaacctgtgtggtaggggcctcggtgttcgttacgccgtacatattgagatggtaagagacaatgtcggccacggcttgggtgtctgcggcggaacctgatcggcagcaccagatggtatcgtgcacctgtgtcaatttgtcggtgactcggttggcaatgtaggcaccggtggttgttcgactgtctgcacccaggatgactccgtctttgaagttgatagccatgctgttggaacgttaatggaaatgtttctagatggtaaggttcaagagctccagctcaactcacatcgaggttcccaagctgaacgaagaacgatgggttagtatatgctgtgaagctccatggttgataatctcatcctgggtttaacttacttgacctcgccggacttcaggtggttcatgtcgatgtgaataccatctagagatattagctggttgctgtcggcggatgacgatagctctcctcaccttcaccgagcattcctgatgttccatgagtggcgaccattttgtgctgtgttcaggagaaagtggagaaagtagatagatgacttcaatagacctgataaaagagcaaggagaagagggaggtccagggaagaagtagaggtgatgctatcatgaacacaggcagaagctcacaacgcggcagctcgggcggtgaggccccagcccctgcgattgacttatcatattccccgcgagactcctgaagctcaaattcccttttcttctgtggttatccctattaacttaccgtattcatctcccgtcgcattcaagatctcttctagtcgataaattggcaataccagagtccccatacctcgttttctcgcgtcctctatctggtccccactcttaaagtgccagcaccatgtccgaatcccctccgcctccgtcctggagcatcagcaacatggccaacagtgctgcacaattcatgcgattgccggttcttgcatcatccggtctggctgttgttgcaagtgggctcctctacttcaagcaaaagtacgctattagcatctaggccatttgtttacgaagctaatcgctttccccagtgaactaatttatccccgcaatgtccccgtggatgcccgcacaaatgttcccagtcctcgccaatttggtatcaccgactttgaagacctccagatccccactcccgacggggagtccttgaacgccctttttcttcggcaacggccaggccgcttctcgcgcaatgtgacagttctaatgttccacgggaatgcaggcaatatcggccaccgcgtccccatcgccaaagctttacaagatacacttcaatgcaatgttttcttgctagagtatcgcggatacgggatgtctacaggcacaccggatgaagccggccttaagatcgatgcccaaaccggccttgattacctacgacagcgcccagagacaagggataccgagattgttgtctacggacaaagtttaggtggtgccgttgctattaacctggttgccaccaacgaggaggaaggtgatatcggaggactgatcttggagaacactttcctgagcatccgcaagttgatcccaaagtatgttttcgaattatcagaaagattcccgtgcgataatactgacttcaaaccagtgtcttccccccagcacggtatttggcacgtttctgccaccaatattggaccagtgaagatgtgctgcctaagatcaccaaaactccagttcttttcctgagtggactcaaggacgagctggttccgtgagtttgcctacgccaagcgtcacgctttctttactaatattccttagtccgtcgaatatgacacaattatttgccgtttgtaactccgaatgcaagatctggcggacactcccaaatggcggtcacaatgactccgttgctgagccaggctactttgagcacattctttccttcattacggaagaagttctacctaataaacagtaaaccgacctgacttacttatttgcttgggcttctcgaatccctagcgaaccctttgcctaggacctcccttcccgggttttatttcccgccaagaagtgcaaagacttcaagctttgctgcaattgcttggctatctcgctttccgatggccaatctaaacgtctggttaggcccttacaacataagactcaattgacaggaaccgttgattatgaccttgatacccctgccgcgcaaccaagacacgaatctcactttgcatccgttcaaacgatcacggcccatacatggccctgatgaattcctttattatccccgagtcctcggggtgaaacgccatacctcccatttgagaatggctcttttcttctttctatctcaccttgtgatttacattcgattcttgtttccttcttgtttcctccttgctgactattatcatactcgcggtgcttacaagaatatcgggcgctgggcgtgtttcttttctctgcttcatttttcggcgaacccttgcctttcgccttgcttatcagctccggcaaatttccttcttgtgcaaatactaaaccaagagaaccctttgaaatcgggtacgaatgtaataatcttattcatgattctttcgctgtgcagtcctagatccctaccaacgacgggctacgttggcattgtccggtcgttctaaagactcttgagcttacttgcaaggtagaggggaagcggaacccccgggatctaaagagcgaggtcactaaacaagaagcccattatccccttgggtggccacagactcggtaactatcagccaatgggcaccggccatcggcactttatgtatcggaatattgatcagacgatcaaggatatttggcgtcgggttgtggaggtgcatagaactgcggcgactttgggtgagaggtccggggattggcgatgataataaacagatataatttgtgttttggtattggtgcttgaatatattagaatagagatatttgccagcgagtgcattctttgaatctgaggcaagttgaaataaaataatgttcggttgctgtaccatgatatatatcaccgactcctgactgatacgattattctttgaacgaacccatgcatgataatccacaagcacgttcgtgtcacttctttatttattgaaaacacatacatgcatgtaagactggcgattaggatggcgatttactagaaatctgttttagaatcagtggccaattctttggaaatacccatgtctattattgaaaccacgagagtttaaagtcccaaagatatataaaacatcagacaaatggaatggggagatacatataatacacgccacaaggttttagtacaagagaaacaaactacggaagtttctcggcctcttccaccagttcctcaaccttgaagttctgaacatcaccccgggtgaacatgcgaacaagctcactcttccgaccagcagcctgtccctcaaagtcatagaagcgctgcagacagctgacaagccatgttgcctgtggggccgaaacaccgccctcgggcataatctggccatgcataagaacaagacccttctcatccgctagatcgaggtggtgagtaagagtagtgtgaggctgggcaaacgagccatgcatcttgtaagcagccagattcgtgaagataacagtagaggtgtggctattcgaaggcgacagagtcgatccctcagcaggcgggtggaaagcccattggaggaagtgaatatcggcaaccgtgccaacggctccctcgggcgattgctctgcctcttcggcagtctgcggacgcgggaggggcaagatgaactgcgggttctcgcgtccggcatgcataatgcgattgtatgtgtcgagagggatcaccgcggtgatggcatacgggttctctgcaaagcggagacgccagagcgcttcgatctccttgactgggagctcgcggaccttctcgatatccaggtaggagctgagggccttgacggggctcgagtcgctggagacagcgcgtgcagccttggcgatgcgcgattcctgtgggggagggggtgctttgaatgctgggggtgtgcctgggacggtggtggtggatgtaggagctccaggctctggggtagctggggtggatgctttgcggcggagttctttgattttttcggtataggcttccttcaaagactcgactgagtcatgtccctccctggataaaatacttagcaatatgcaggaggaattgttcaggaaagtttgctcactctttggccttctggtccagcttggaccgatacttttcgaagacatacttgggatcgtggtgtgaggcgaggaagcggacgtcgtggacttgcgcccaccggcgctgctgatgacgcagcaagtgggagttgccacggaccaccgattggaatccttgtagtcggaatgatggcattttgagtctaaagagtaaataaaatgaagctccgaatctcgaaatgccgggccggactagttatcagatgacataattactgacataagcatattatttgttgccatattattaaggcacaaagtgaaataaactaggcatcaatattacctcattaggacatgtggcttccttatattttactgaagagtaagtatttcaagaatcctcactgggtagaccaaccgttagctactatgcttctgcgagcctggggcggtggtgagcagaattgccatattgggccgtatcggagagaccgatgcaccgttcaacacagcatcaagaggattctttttttttttacccctcgggcttcagagtaggtagccataacatgcaacaaaggactaccaagaaggtaagtattgatatacggtaaaagaaatcgaaacaagacacgtctagcttttctagcacggtatcaattctccaaatctctatgttgagctttccaagttacacctcttgatcctttgatctgcaaatagtcacaaggatatttttgtttcttctttcactgttcgaagtaactgacttgactcttaaagcaaaaaaccgtcaacataccatctgtacctacctctgttagctccaatatacgatctctgtttctacggtatatccttgcatgtttctgaggaaatagattgattgatgttcaacagaaaacctaagtgccacctaatgattgcaaaagtctttcctaccaattcacatctccatacatccataactcataactatacacctgtacatggacccacctgtgcccattagtcagcacatcattgcccaaccaaggctgctcatgtggaatgggccctgaactataactttaaaggcaccgtcatctacctaaatccagctcctcagaagcaaacccctcatctaccaatatcctcatcttttcgacatcccaatcttccccatctcagaaaagggaaacaaataacctaaaaaaaaatgccaatccatcaaaaagaattctccaccccaccaccccatccaccagtgggcacgcccaaggactccccgtccgcactaccctggtactccatcgcgccgggggtatgggaatttctgctaaatggcgacggagagcacaaggctgtgctacagtggtgggagccaaatactgtctctgcacagacagagccaataacacacacctacatcgaagaggtctgcactctgcgcggcgggctggaagatctgtcgctcggacagacgtggagtattggtgcctatgcttaccgtgagcctgggatgaagcatgggccatatcgggcgacgaaggatggatgcctacagtttgttaaggtcgtgccggcgaagaagtagggtttggaggcttggattttgagtgtgtagctggggtctacggacattaatggctacatctttggctatatgagatttgggtattgatgatttggccttttttttggagttgtgttagagtgtctctggctagttgtttttttctttctttttgctgcaggctatgccaaatatgacacattaaggaatgaacaactcgagaactttatgcaaggagttaacaaaatccggggaagcgggtctgtggttcgaatcacgatagaattaatacaacttcattttcttctctaagaaagaaaaaaaatggtggcctcccccaatttgggtgatctactcgtttaaactagccgcgtaacgggttctatgcacgtgtgttgttagcgaatctcaatcggtcctacccaaacgaagggaccagacgggccaatacctgttaggattcctatgttctgagagatctcgccctggcttgaacacgatctccggattcttgcggttaacggaaggtgtacagccttgggcccagagactgcaccgacggtcagatacaactgagccaagtggggcttggggtgaaataactagtcggtctggtcataacagaacctttttaaaatctttctagggatttgattggctggatcttgttcttctcagttaggtaataatgaagctattcagagttccgaggtccttttgatacaatattctatcgtgtatgatgagactccaaactccaagttaatgcaaatgatttcgcaaagaaagggacatgtccaacgcttttgaaacatttttcattttgtttctcaggtcatcaatcatcagatcctgtccgaatccgaaggttagaccagcacatctgtaacaaatgcttcaacctgagttgcctcagcctgagtggggctatcttccgcagaagtctcggtctcaggtgcaagttcagattttccctcagggtcctcacggacaactatttcctggtcctggtcccccgcttcctctttctcttccttctcctcggcctcttcccaatcatcaacaaccgcagtcgcaggggccttcgcacgccaggacttcccaaccccaacgccagatcttaaaaccaagcgttccttcttcgccccgtcactatcgagagctgcataaattgacttgctcacccacgggttctgagcaggagttccagctctcgaactagccccgctcccacccttactcttcgaagcaacctgagcccaaccaccgtctccagtactagcctgtaccttagcggcttcacgggtcgccttagcctcgagcgcggcgacacgacgcgcttcttgttctttgctgcgctcccgctcgcggagcttgacgcactcgcggacgctcatgccgccgataccgatggtcgagccgctgcccataccgaagagaggaggtgtccaaacaaccggttttaggacgaagacgtgacgatgaggttctgggtcgtggctttctgtcacgaagccccagtctgcggcgagggagtgcgcaaatgcgcggagagtggatttcgccggctggaagcggaatgagcgggtgggtttgtctgctgctgccagggtgtggagattggactcgtaggtttggagagttgataaaggtaccgagcatgcgagctggacatattggttcagagtctcttccgagtaggggaggttctcggctgtgatggtttgaagcgtggttgtctggttgatgtcgatgccgagagcacctgctagggagcggttccgctctagacgcgtgcattcgtcgtcgcaggccaacggggtcaactctggctgccgctggggcgtctgcacctggcccttggaggttacagccttggcggcattacagcgtctgtcttgtcgcagtcgcccacagctacatgtcactgcgatcttggacgaacacggtgtcttctctggacacgcgtatggcgcgtggcattgctctgtgcaaggatggccgcacaccgtcttgttctttccacagggttggctgcaaggtttggttgcatcttcgcaatcctccgggcgatgacagtccttccggcagaaatgagagccacacttgagcagctgcccgcatacttgaccgcagcgcgcatctgtcagccagcagggcacatttttcaacacccgctttccgcacagacacgccttctcggtcaagaatggacacttcggacagttctcctcgtctgtgtggcaggtatgtgcggcttgaggatggccgcatcgctttggacgctcacaggggaagttgcaagcaggtggctttgcaccacacggctgcggcggatacagaacagatcttccgcaattacacggaatctcttcgaacactgcctcccggcaggtattgcaagcacccttatggcaaacctccggacatgtgtgccttccgcatttcagcatccggccacatacgcgagtgcagatatgctccgcttcgatgtcctcatcagcagggcggagatgagacctgagtttacgacgcgcagcctggcgctcgttggccctttgctctcccggacaacacctttcagtgcatgtgtgtcgaccacagtgtagagtcgccttgcacatgcgtgggcactggggaggctcattcttgccctgatgacagattgtcaggttattagtacgaccgcagttgcacttgatgtagacattgcgcaaacaagcaccgcaggatccaacatgacacagcttctcgcaaggatggccacatggtaatgttttcccacaaggcttttgacaattcaagatagggtcttcgcaggatgttcgaggtgtatatcccggggtctcagataacggtgtcttgccacaggcgcaattgaggatgacatctggtgactgtggacagtgtgcaggatgagggtcttgcggatgacagttcttctggcatgaatgtatgccacaatcaaatggacggttacaagtctctccacaagcaaagcagccagtccactcatcttccgagccatcgtcgcgaatgattcgactgtcctcctcatcgtccttagacttacacatcatctccgtctgcagttttccacagtagcaacgtgcatcaatgctaacctcgcacccaccacacaatccctcatgacacggaagtggacatgtatgttccccgcacggcaacaactcaccacagatttcgccacagctccatccattctcataatcggtatcccgacaacgcttctgcgacgaattacggccacagaaacaatcttgtatcggacccatagcagtacaaggtgtacaaggaccagcatgacaagtcgtgtcacaaggatgggggcaacccttgcgaggccgtgaacaagtctgaccacacgagtgcggaggtaaaccgggaagtggtcgaggatcgacctctttctcacaccagcaagagtagctcgagggaaagttttgctgataaaggttacagcccggacaacgccaagcgcgaggagtggtaattttctgcccgtcctcttgagcagaagttctctgtgcggctgcaccttcattcgtggaccatttcttcacacagctcagatggaaaacagtccagcacagctcacaagaccagacccgagacctgcgacctagctcgctgcagcagatagggcactcgtacaggttatgcgatatgtcttcgtggatgcgggtagccagatcgtcggctgtggacttcgctgtgactttaggtggcggcgccctaggctgcttggctttccccttccctttcaaggatggcgttgcttcagaagctcgtccttgctggaatgacggggcgcccggtacaaaatccggcacttcgggtcttaatgtgttatcatgtgaatgctccgcaccatccaatagagggccatttttggcctggtctggtcttgtcaacttggcttcgaagccacgcgctctcatcccacgggttcgcgcctctggtcctgtctcttggctctcaagtcctccattctgacgaggtccattatttctttgtctgcggccccttccttctctgtttccgcctcttcgcgaattggacggtccatcttgttgattgggctggggtatcgtattcggctgtggttgagactgtgtaggctgtgcttgcggtgtagcctgattttgaggttcaatcgcaggggttttttgctgaccgtccggcttcgcagaaccccgccctctgcgtctagatggcctggaagaacgtgggggtcgtggcccagttgggattgaagtctctggctgtgctgttgccatagctgaaaatgcagcggatgtctgactggagactcctagcgtgctcatatgcttccggtagtctttctcacttgcgcttggcttgaagagggtaattggtagtcgactgagtgtgttggtataacgtagactagaaaagtactgagagtgaaatgagcggaagctatacactgaataaggcaacgaggaggaaaatcaaaggcaaaagcccgcttatagaatgaagagagaaagtgtggcacaacaaattatccatgaaggcgataaaagctctcctggcagaattgggcggtgcaggaggcggtgacacagtggcaagccgctcaggtgtgagtcaggaattacatcacatgactcattgtgcctgtgccccggtggtaatgtgggccggcaatgtataaattcgagtcatgcttcgtatctgagggatgatatgagccggtgtaatttatttgggcttggttgatgcatgcaatcacaaagtgagagggagaagaggggtgttggactccactttatgccaagacatcaaacaaagacctagtgaacgaggcttatatctataaaacagcatcttgctgcatatcacagaataatcaatcgggccttcgttatgtgctcgatattaatgagaggagctaactccttcgcttccatgcctactacaaacgaaggacactagaaaagacagccaaacacattatcaatgcaatttagtcctaatgctgaattaatgtagacaaaactacaaatatcgaacctagcgcatcaaaaaaacatggcgctatgcaaaataaccagcccattcacctcgtaacaaagaacatcgtttgattgaaatcatacacacatcgagaataggctctaaatgaacacaacaatctcaccacgatcgttacgtcttagccgtaacgcgcggaaaagatccttctcatcatcagccctgcgatcccggtccacccagccgcgcccattatcatgaccatgatcagcatcatactcctccgagagctcacggtggaagcgcttaagcgccttgttaagggagcagccacgctggctatcctttgggaccagcgagaggaagtgataggccagatcgcgctgcaggtcctcgtccgagcgcgccggcggccgcgactgcctgtagacagccacttggtggccgttcgaggagtcaatggagacacggcgctcgtcgacttgcttaagacggcgggagggtctgtcgccatcggtggggtttgagctcttgcgcttagatttacgggagtcatcgtagtcgtctgcgcgcgcgcggtgcgatttcttgttcttgcggacctcgagctggccgtcgccgctggagaaactaccgcggcgggcgtggacaagagctttgggggcggaatctgtgttggagccgttggtgctcgagacagctgaaccgccgaacatggaggagacgaggcggccagcgcggttcttcattgagatgccgagacctggatcaccgttgccgttggcttctttgccgttgcggcggctgcgcttgatcggggacgaggtatcttggtaggcacggcggctggtttcggggctgtcgtcgccgtcggcggatggggagcgcatcatccgattcaggccgccggtcaggccggaatggttcagcatgggtgtgccggcattgttgatgatgctggacggagcatccatcattgaggtgtcgactgcttcacccggggtgctgagaacctctgcttgaccgcgcttgcgcttcttctcgctgacagtgccgggggctttctcctcgcgacggcggtccttcttcttcttaggtgcgggcgtgacgaactctgttgacgcattcgggggcgatgctgagtgcgggatgttgccggcaccgtatgaaaagccattctcctcgaatgcgatatcgtaatttttaccctcgtcatccgtgttggggtttgtttcgacgcgagtaagggactggctgggctcgaagagcgatttggcattggggttcatcttcatctgttccttgggtgcggcaagggtgaccttggatgcgttcggagtctcatcggcgacgaggtaatcgaacacattgacggccttgtcattgttggccgggggaggagcaggggccctcacatcaccgacaggagggggagtgggagcagggggaggaggagcgttcttcagggcctcgccgtctgaaccgtcgtccacacggggttgctggtgacggccgttgggattctggttgggattctgcttgttgttttgtcctttctttcctttctggggcttctctttatatagagcaccctgatacttttgcgcctcggtcatgcatgactgtggtggccggtctcgttagcggatgactcccttgttgattcaataattaggaccctagtggagtagccccacgaccattatgcgaaaatgcgacgcggatccgacgtaccgtatgagctctatattccaatccgtagaaatgcaccatacaatcgatacaggtgaaggaagcgccgcgacattggccgcgatgaggatcgagctttttcttagtgagaacatcaccacatgcctaccacagtgattgttagcagcggttcgagcgcggcacacgcctcagacatcatataggacttacctcgcaagagaaggagaccattgttgacactaaagatcaccctatcaggtgcgcaaagaagattttgagggcgggatttttcaagaggggggttgtatcccttgagaagtccagcacaaaacgtctaagcgggggatttgctttgatacaaactgcgatatctcggcttttcctctcttttttttctttttcttttcgcgtcgaaaattggcgcgcaagtccacactagtctcgatcgggagccgggctaggctattttgggtaatatgaacagcctgggcgcgtcgagggagaccaaagtgtactccttccaactattttgggaacattcgtcgtataaaagaatgcaaagaatgggagaaacccctgatttatcatctcttgactcggcacatgtttcagggtaactggaaaggcgcagatcccatgcggacatggatggctggcctgtcaggagaccccatgctttcattcgcttcttcccaggatacgagaagtcagactggccgactggccacccttgaaacatcccatctcgacggctgtatgctatttttggccccaactcaaacactcttaccggactataccgacatatgctaagatccgtgatataccgccctttttgaggtttccatcatgctacgcgaaattagttgatctgttggagggttggtatcgcgagggtacgacctgacgacatcattgctgttgctgatagtgaagaaagtttgatcggtgctttgtgctaagacaagctcggtatgacggaatgcgccttttcgtctgctctgcggtttagggatactgtctaggcctctttggtcatgcgcgccatcttctacacttggtcaccaggtaggatgatctttgcgcgtagattgctcgggtcatgcactttgtagggatcggcaatctagaggatgcgggacatgtatactactactagtcgttgaccggcttgtagctcgctatcatttgtacttttataggattgaggtaggctctccaagtatctttattttctgacatgtgtaaatgagcaaaacccccaacagatatgctcgggaaaaagagctagaaactaatgataagaactttcgatacctcgagacagacctctttttatgccaaagccacatgcataacacaacaagggtatattgattgatattgacatagtcaacctacgatttataattgtacaagggagaccagctccataagcgtgtgcaacaaggtgtctaagaagcatccaagcgctgggtataaaccagacaggacgagccccatgtaatcgaaagaatagtcgaaagaatagttgaaaagtcatcccgtcaaccacgggtcgtcctaaaccacacattagcaaccaaacagccataaccacgcggcacaacaagaagtcactaactcttctttcgagatctccactgcaggaccatcatgctgccccgtagtctccttcccagaatcagaccgagaagtagctgacccctccttgccctcacccaccttatcgtcctcactgcagccgcaatcatagaattcccccagattggtgcagtcaaactcaggcttatcaagcatcgcattgacctcattatgaacgaagcaagcccagccagaagccgcattgcgcgacgaaacctgaggcggatacttgctcaaatgctgcatgaaatgctcagcacattctccactgatgtcatcaatcgttagtctccgatctggcacagagcacgtaggctaggaatctcattaccaaggatataaccgagcaaaaaggtagatataagagcgcagagcctccttttggtcttccgtgggcgtctcggggaaccgcgccatgacagtgtggaagtacttccaagtcgcacgacctaattcagctctggaaaagccaccaattctgtaatcagcaatttgtccaattgcgctcgtgcattgcccaatgtgtccctccccggagcaccttacttgactgtctcattgcctagcttcggcatcaccacgtcgcccttcagtgtgttatcttggatggttatccccggcgcggctgccggtgccgagtggtcgatgtggcctggagcgcggacggcgggactcggtggcccctgaggtcgaatgaagaggaagaatatgaggcatagtgcgatcgctgtgctgctgataatgcgccgtgtgatttgtcgattcgccatgtttggggcgggtggtgatcgttggggaaaagcaatgtcgcgaagcgtccggtcgcgggagcacctggaacttgtgagcagggaatagtcccacgcggaatacgagatagaagatttcagctgaggatctgagaaatgagtgctaaagggctttgaacgaaggggattccacgcttgggctccggggaggcacgccacagcttagtcatgggttcgccggggccacaagtgcgagccctagaagattcctaaagtgtctgtcatacgattgatccgtatgaaacaataacattcagagactctattcatactaggtgagcattgctctccgaatcatagactcagcccatagagacccacatcggatgtgctccgggtttcgacttctgaagtggatgcgtaccctactagtagtaatacattactgtgctcatggatgccaaacatatatatctacatcccatcatgagttccacctactgaaatcgagtcgctcaaacttggaggtaagtcctccttgcgtgtaccccagtcgctctccttgttcccaagtgtcagctccagcatcatacctcgagtaaagaattcatgtccaatccagttcttggtgtagggctttccattgagcttggcactctggatatatatattcttgtaggttttgtcaaagttgacattccgaatggtcgcagtctgattggtttcagggtgggtgattgcgacggccttgaagaacggaggaattatcaggtacacattctgaccgggattcgggaacaggcccatcatgctccatgccaggaatgagcccatggctcccgagtcgtcgttgcctggtagcccgctatgcgtggcgttgaatgaagatgggatgtaagcgtgggctcggctggcggacagaccagggcgtcccgcgtagtgataatcatacacggtcaagaagacaggttcattgcccatgtctgccaagccagaggtgtggaaatagtctaatcgagacacgaaggattctgggccgccgactatcttgatcaactttgccatgtcatgtgggacaaaactatattggattagcgttagaagctgactgggaagaaagagtacacgcacaatagatactcccagatgctggactcgaatgtctcggaaggattcgaggtgagagagcaccacgacgccagagcactacaggcaataggatcctgatagccccaggttccgttgatgtactttggctgaaagaacccagtaaagccagtgtctgttccattccctaggaacgatttctggtcttctttgtacaagttctgccagttgccagaccgagataaataagtggtgtaatcatttttgccgaggcccttggctacaacggacagaccgtagtcattgtacgcgtactccagggttcgggagatactccgtgaattagtcccaaatccaatatagtcgaagtccagatatggaatatagttgaggtgcttccagctctgcagaccccctcgcccttcatatgaccattcgagtggctcattctctgcatcgttgaccatagctttgtaggcaagttcccagtcaatacccgtcaggttcttcacataggcatctgcgagaacaatatcggcattggaacctccctgcgtccagcctttgcagagactcatgcggcaatcgggcagccatccttcgtgcttgaaggtgtccagcaagctacggaccatctttgactgtgattttgggtcaatgattgtaaggaacgggtgctgtgctcggaaagcgtcccacaggcagtagaaagagtcaaagtatggctcgtcgcttttccatagtggattttccccggtcagatcttgaggtgataacatggtacggtagataccactccagaaactgctgatcatgtctttactgacgccacccgacgtgaccttgataggactgagcttttccttccatgcagcctctgcactcttacgtagatgatcaaacgcatcctccggttcaggcacttccgcttcggcatttttacaggcttgatccgagctgacaaagctgatgcccaccctcacagtcacaattccattctttggacgaccaaatgacatatagcctccggcttgaaggtagaagttgttgaagccgcgagtgacaaacaactcctgcactgatccagctcggtcattgacccagatcccggcctcatcgacctcagcgtcaccaaaatcagcacagaaatatgacttgtaagagccagccccgaaactcggcaagaaagtaccattgcctttaatttgacctttgtcggcgtcaaggctgatggaagcattctgtcgactatcccacagatcagttaaatccaccgagatcaacggattgagatcggttccatccgccaactttccctttgggaaggtaaatcgatacaatgctgtgcgccgcgccgcagtcatctcagccttaatgccattctcgagtgtcagggcaaagtagccaggttgcgcaaccacagaatcattcttgtagtgaaccgcgcgagcagctttagggaacttgcaattatccaagatattgtctttgcagtactgtgggaacagaggaaagtttcccatagacgggttcccgcctgtgccactgtcatgcatatgcgaaaagccagtgacattgctcccatcagtcgaaaaacctccggtattctggccatcgacatcggcgacgggtttcgccatgccatacgggatgcttgcacctgcaaagacattaccgccattggttgatccgatcaggggattgacatagtggagatcatcttgggttgctacagtgcctaggacgcattggaggagtaggaggctgcacaacttatttctctgcaaaattgccatgacgctctggaatgtgaagcttggaacatacgtaatagcgcgttgggtttgcggatttgggctgtcaataacacgatagacgcagaagatgggaagagagaccgagtcccttctgcaaggggtggtttttcatatcgctgtgttgcaacgtcgcattgttcatgcgatcgacggcctaaatagtgttagtgttggagttacggagacctttgagtgcggggttagtgtatccccaagtcaacaatgtactgaagcatgttttgcagttccgcattgccagatgaaagcgaaacaaggccctttcgaatcatcctaaggtattgacttcaaattatagccgtagagttgagtctctttataagtacagcctctttccaaggttgagactctggtcaaacaacgaatatttgataaatatagatcatgtgatccactctctggccacttgacattatcatttcttcgtcacttttatcattcacgaaaatagaacctacacttcatcttgtcatcccttatgccatctgcacgggaatctactgcatctcagtacaccagactacaaccaccaagctttcatggattgatacttccaagatgaacaagaaaatgccaataaacctgcccggtcttcctcttgagctgttgctcatgatatccgagcactgtcgacattgcctgtctcgcgttatgcagcgaccaattgttttttttgcttgggatctgcatgtcagtcacagcctgccaaagggccgcactgggtgccctgaggatgggcggcgtatcgattttctgacacgctttgcccgtgacttgccacagtattatctctgccacgcttgcctacgactccatatttggcaaaatgtggctctaccaggtcccaaattcaaagtcccagcctgcgtagagtccctcgatcgaaaggtacatcgcctcaaattgcctctttacgttatgcattacccaagccacgcgtactacaaattccattgtgttcatcttcaactttccatgcgaaggttttaccgtggagctcaatttggaatacccgttccgtcattgctctatacagaggctgggactaatcctatcacgaaaaaagcactgaaactcaccaaaccgtacgacgaagagaaatttcaatgtagtcatatgacaactttactgtctattgatgttcgaatctgctcgaaccctccgagcctttacttacgaacgcaagagcttgcggtagtaagacgacaatacctatcattgttatttccagatcctaaaaacgagtttatgcacgtctgtatgcatattaaccgtggctttaaattaatctctgtcgttcacagacttactaataaatatagctatgacccgacaacaaaaccccgagatcaagggcgttgtgataaaagcaatgcctcatggcaaatcgagatacggagtatgggacagaaagaagtgtgccttgtgttcacccggtggctcgacttaggaccaggactaagcccagacgatgatcggtggaggtgtcacaatgaccacgaattcgaagtcaacttggcagaacatgaaaaggttgatccctgacagcaatttgaaaatgactccacacaggccaattgctcggatgcgctctcaagaggaggaaatgtattatcgtaacatccgatttattcaaaatcagacatatcgaagcttgatgactcgctttggggtatccgactggtgcttatacgtagaacaatagcgaaatcgctcttcttgctgtgttgttagttggaatagcccaatgcattggtacttgaaggatataactgggggaaatcgcaggagcagaccaggttccaatcattgcaagcaattcaactcggcccatgtcgatgaggaatatttttgcttgtttgattgcatggggggtgcctgccgtttgtgacttgattgccttatcgggaaggcacctcctcctcctcatagcaatgactcgcctcctctacatttcctttttctttctttctttatttctttctatctttcttcgtcattgtcatagcttcgtttattgagacccccctgcctgcgcaattaaacaagcgaaagtacagtctatattctttatcgtcatgggccgagttaaatcgcttgcagtgattgggactttcatttacagacatactctaggtcgccatggtggacaaactccatcacattaccgacctcccattgcggaaatggtcccgcgcatcaggctacgattagacattaaattgacggtgatctgatcgtacaaaaaagaaacactaacaatttgcccgcttgcccattagccgtgtcaagtttgttaaaggagctgcaaattgctttcctttaccgaaagtcaactttgtcatggctgctaaccagttcatatattccaatggatgtagtggaacagcttacaattagatttgttctacatatggtgtgcacaaactaacagactgctttcttacaggtttcataaaaggatgatcaaacggggattccgacgggttcgtgggcgcagcgaactccacatggtggcaagggaggtcaacatcattcacgtagggaggggatcatggatgaatgggtgtggataattcaagatcagattagatgacatggcacgattgatttgattgattaatctaagttcctggagaccaaaaggatttttggtttgctcaaggaattcctcggtcacagccaatataaagtttttgctctcgcacgcgaccgttgaagggtgtgggcaagaaacatgatccgtacagagtactgataataacaaatagtattccatacgaagtagagtagtaccgcgaggcgcctcgaacgcttcgagacaatgcgatctagccccgagacccatcccgcatgtagaccttgcctggacagatagaagcttgggttaccatcgccataaaccccggttccgcgtatctgatcggaatcagataagtcaaaaaccagacaagagggcgtgaaagtcaaatttcgcggaggacccgaagaagatctcgttccacaatgctcaattgagttcatatggcgacttcaaaggccccgagaagatgatgattcatgcacgaggtcaataaatgcttgctgttttgggcactaattgggggctggaaacgaccttgatctttcctttgtgttaagcttctcgcgaaccttacactgtacaccgcgtggaaacgcaagggaccgggtagcctttcctagagggcagtaaggggaaaaaggaacatagtgagacagatgatggcatgactcgaataaaacggtcttcgtgatatccggccagcccttcaagtggtttggcgtaagtggtggacgcaaacgggatggccgcatcaagcaggtagcagccctgaaaagagactttgggcggggaagcgctagtccagaataggagggagactcgaatctcggccaatcggggctgcggcccccacaccatctaggggcttattggggatgatcgccgtcacggcagcccctgattgggcccaatatcagatcaactggaccctgtccgctcaccccgagattatctgatcgtcgcatcggagcctccgttcgagaccgaggaggggaaaaaaatggagatgtcttggacgactgcgggactttctggtctggaagctctcgggcctctgttcgtccgaattaatagaaaaaagaacccctctagcgtcgcagatctttcctttctccttcccatcctcccattccgcccaatactcaatccttgtatatcctcacacagtcccggaagcacctggggatctggcatccggtttgatttcctgatcggacgaaagggatacacagtaatgggtctccccgcgaccgctgaaggtnnnnnnnnnnnnnnnnnnnnnnnnnnnnnnnnnnnnnnnnnnnnnnnnnnnnnnnnnnnnnnnnnnnnnnnnnnnnnnnnnnnnnnnnnnnnnnnnnnnnnnnnnnnnnnnnnnnnnnnnnnnnnnnnnnnnnnnnnnnnnnnnnnnnnnnnnnnnnnnnnnnnnnnnnnnaagggccccccccgcgcccgctgaaggtcgggatgacggcaaaattatcgaccgaactataatcggggaggaatcacacagctcgcaaaatgagaaatcggagacacgcgaggacaatggcgacgggtcatcatatgatcctgaatcacctcccagattggacggctcccatgggggcgacatgctcgacgatgagaaggaattggaactgcaccccgacatgatcacggagggtgccgagttaggtcagcagaaggcggaagcagcagcgctcgcatggagctggccagctttggttggaatatatgcttggtgagtagatcgtggctcattcgttccggcgctcttgcgatgaaaccaattttctgacaatgaccgaacttgcaggatctggatctgcacatttatgttggcgttccactcgaatataagcggcttcctaatcaactacattcagggagggttcaagtccgcaccgcaggtctcaacatcctatatcctcgcgaatatcgtgggcggcgttcttaagctgccgcttggtaagaccttgaacttgtggggtcgtgctgaggctctggtggtctcgaccagcatttaccttcttggtatgatcatcctcactgcatgcaatggtcccaatggatatgctgccggctacgtgctgtattggattggttactactgcctatacctgatcttgaatgttttcgtcgccgatacctcgggtctaaagaaccgagcgttcgccttcggctttatgcagactccatttatctgtactgcattcacgggcagcattgcagcaaactcgatatacgccaatttcgggtggcgctggggttatggcatcttctgcatcgtgatgccgtttgtgttcttgcccctcgccatggctttcaagtactttgagaaaaaggcacagaaaaacggcatcttccgacgacagcccagtggtcgcacggttggacagtctatcattcactatatccatgaatttgatggtaaggatactcaaaccaaagctcgggatattcacactaacattctattactagtcattggcgctttcttgctaatgagtggttgggtaatgttcctcctgtcattcagtttggcgcaatatggccgctctacgtatgcgagcgcaaagtttattgctctcatcatcgtcggtgtcttcatgctgttcgtctttgcagcatgggagaaatggggcgcacgaacccactttatccgctacgagttgatcaagcggccgaccattctaggcgcatgtatactggctgccgtgctgtttttcagtttcgaactctgggatcagtacttctacaactacgtcttgatatcctacgatatttccgcagtccatgcaaattatatgatccagatttacaacgtcggctcttgcttcttctctcccgtcatcggagctataatctgggccactgcacgcttcaaatacatctgcctgttcttcggagccccgctcatgatcctcggctccggcctgatgatttacttccgtggcgcagaccacggcattggctacgttgttatgtgtcagatattcatcgccttcgccggcggcaccctcgtcattggcgaagacatggctgttatggcggcaggtggccgcgagggaactccgatgatgctggccctcatcggattgttctcgaatatcggcggcgcgattggcctggctgttggtgccgctatatacaacaatgtctttgtcaataccctcgcgaaacacttgcccgacgacttgaagtctaatgctaccgagatctacttgaatggtatcactgtgcagtcaacctacccatggggaacccctcttcgcgaagctgtcgcctatacgtggggctatgcccagcgtctgaattgcattgcttctactgccgtcttggctttgaccattccttgcattctggtctggaagaactacgacgttaacctgaagcagaacaagggtaagatgatcttctagaagggtttccgttgcacgggtgtctatgtattgtttatgtattgtttatgtgttcttttggtgcgcttaattctctgccgcgcagagagagggccgctactttcatttgtaaatttattataattatctcgttgagcgtggatgatgtgaatgtctatattggcaccaaggtgattggtcattttgcaattattagaaccaaagaatttttttcttcgtttcgcctgcctctatggcccatgtacacatattctaaccatgctgaatcacatcctttagtactggaattaattaccaaaatgaggcgacggcaagaagaccgcggtggggttgaccgcaacccgcgattggttcaagactcatacatccaaaggtcgactttaatttcacctctcttccttctaaccattggcatcaccctcaaggtgagatattgaattaccttcaccatgcctccatccgcggcaatgaatttacgcaattcctttggcgatcggaagatccccgatatctcgcgcaagattacggcatgtgtcttgtgtcgcaaactcaaggtgaggactacacggttctaaaaagagagctatatactaataccgatgcagataaaatgccatatgactgataataagcccccttgcagccgctgtaaagggcgtgggcttgcgtgttctgtcaataagagcctccaaatgctcttggagaatgatgcttcgcatgttgtccccatagcccgtggtttcacttataactctggctgatacataggtttagatggaaggaacagatggaagatcgaatgagcaagctagaacagtctatcgaacaaaacacaactcagccttctgcggttgcctcgggcaatgccgctctgccgcagccacttagtttcaacagcgtcgaaactgacattcccggcggtttatctaattccctacctctggagacacctgaaactgtcactttaaatctatcatgcagtcttggcgcatttccagcatcgtctatcatcaatcttacgctgggtaacattggagcagccccaggacgaaaccccgacccagtttcatgcggatatatctcacaggagatagcagaggaactcttcgtattcttcaagcaaaacttggacccttgcattcacaataccctcggcgagaacgactctttcagtaccatccgtacacgctctccgctcttcatcactgcaatatgcacagtgtctgccttttgcactggctccgataaatacagtcccttactaaaacatttcacaacccaagtctccgcgaagttattttcgtgcaatcatacattcgacgacgtccgcgcgctgtgtattggagctttatggttgaatgaagtttccaccgcgctgaacagtttaggtgagcgacagtgacactaatggtctcagatcttgcctgtcagtatactaacaattattcagctgttcgcatttccacagagttggatttgcacaggtgcatcacaaaaatgcctcacacaaaacgagcctgctatgaccgtacccggttatactggctggtatacctctgcgatcatcactgctctctcatccacggaagacctccccttacgcgagacttcttttcattaagaaggccacgagattttctgcaaagctatttcaccaacgcttctgacttaagtctaatcagccaggtcgagctgtggtctatcagcagtcgtgtctttgacatgttcggtgctgatattgagtacagtgccgctagtcagcggtcgaataagctgacgcagctgagtgctgcctacgatatatggctggaggaatggcttgccatgctttccttcacgaacgcaccgagcacattttcacgccgtgtcttcgatctttatttccattccgcgaaattgtatctcttctcgcatatttttcgaggctcgtcgcaggatacaaaactctccaactctgggtccgaatctgataccgacgcggacaagtttgcacacggcgcggcgagatgtgctctggcaattatcaggtgcattgtggatgacaataaatcatcctcgtggctgggaaaattaccaacctatatcgggactatggtggcatttgcctgtgtctgcttggtaaagatatccgtcgagcaaagaccgtgggctcaggaccttcaagccgagggtattcccagttaccttcagcgactagttcaggtcctcctctcgtcgccggttgtcaaccaccctacacatcctctactgagcattgccaggagtctggagactgccactgctgtcgctgggggtgtatatggccaagactctctagcctcaatcgatatgcgagatttggaccttgatctgggattttttgatatgtttaccagcgatacgttgaatgggtgtactgataaccacggtgcatttccagggatgtgagctcaacactcaaggccgcttcataatctttttttctttttctttttctttgcctttcgacaacttccggggcagcagcatatacctcctagaggacgcggagagtctcggagtcgccatgcacggctgcaacaaagaagacatcctgggggtcgcactctgtagctttctagtagcctcttgcgacggcaggattagttagttacagcttatacttaattttacccttggctgaggatagtttttgccctaaacaaaatgtcggcagcgatctaaggtggtctatttcatgtattctcagtagaatcctgaaaagtgcagcgaatgaatttcacactaaaagctataagggcacattagtagcattaacataaagagcaacctgggacagaataagaatatcaacgagaataagaagcattttcaaagcaccgtccatcctctgtcaatcaaatcatccaggtagggtgacaaggcccaggcagagccttctgccccaagctgaaagaacccaacgatacttccatcttcgttgtcatctacaacgatgggcgcgccacaaactccttcccggatcgaactagtagtgggcccatagagacggtaaatattctccgtaatgaactcagtgaacgggaccacgataccgggaggtcgtggtggacttcgatccttaactccagccaccccgagaaacactgctccgcttgccataccgtctgcacaacaccatgtattattttggacttcagtggaacggatgaggcgattcggaggctgggcttgggaaatattccccatttgtgaatgttgtcgacgggtaaagtttcaccaaagcgacgtcaagggcatcgaaccgttcgtcaatgtgaccaatgcaaacgcccccattctgagaggacggatgatagacctcatcagagttgataaatccgtgattggagacagtaagtctgatatatcctgaatcggtgtttctaagtttcacgccggcagttgaagccatggtggcatcgaggtaaccactgtctctgttagtaaggccacactccactcgcacttctgggcagagagtttggaggtcagtcaggaaatagttagtcgtatcctgaaccgttccaggtgtgatacagcgttctctgctttggcacgtcagaggccaaaacggcgtatgactgtggtggtatacagtgaggagaccaccgactcttcctgggagagatcgggtgctgtatgatcttccatcaagcgcgatctcaacaatgatgataggagcaatgtaattgacagcctgcactgtcacaagcctacccagggcccgtagaaccgcttcccgttgcttttcggatggtctctcccacttcggtagttgaaaatgcggagagaggggatcaggtagcctcgggttgctgtaatcggtgttcgttgtcaagtagggccagttggatccggcagggataaacgttgctgcaacacatgccacagtcaaagggattggatttgggggaaaacgggtttcaatgatgatgtctggccagctgtaggtcacactttccgcgcggaaggcatcgacaatccacttcctttcttcaggtgtaggaaagcggaaatcgtgtacatgatcatcccagagagagaacggggctggatcagaagcatttcgggcgccgtatccattgttagttacccaagtaaaaaacttgggctggtgggaagcggtgggttgttctggaggagcggtactttcagggtgggaatgcaacagcgtttcgtaagtctgttgccttgatccaaatgcgacatatggcatttggaagcgcagcgtttccaccgcagatagtcgttgctgcataccgtcccgataggctatgtggcctcggctatcgatctgaacacgggctcagacagacaggtatttgtgttgacacacttggggaaaaggcagtgatgtgacgttcagccggactctgagtacaggatgtagcagatgatgttgtctgagataaagtgaactaagtaacctaatttcaaagggaagtgacgatttcaaacggaagtgacggaaggatctatactctgccaggtacggcagccttatctccccgctagttacggagtagttagctaacttatcgcgctagcatgttgactaagcacggtcgcccctttgggtttagtgggtgcactctgaatattcttcttcgggaccgccatcgtagaccaatctcgaaagaatcggattgttattaggacaaggttgtattgcattttcgtatctcttacctagccctgtgtggtaagatttagtcttgttttctctcgcatattcaaagattgaattcaaagttagagtagaccagtgaacacgcttaaacccttccacgtattgcactggaatttttttcgttgatttctatttcgtacctagatcaaacggtctaccgtggctattctgtcagacaatatatgtatagcatcgggtttagtatggtctggggtgtatacctagggtcccgcgggaccatccgccgtgttcccgcggtccacggctcgacggttagattatgtaatccacaatgaaggtcccggggccgccaggccactgtgagccaatcacgcaagtgtcatgtgcagatcccccagaaagtaccgaggtcgggggcgcgggtctcgtttgtccgagataggaattgggagggctcttgcatttttcttggtttctttgttaataccagatccgattctgaatggcaaccatcaatgccatcgcgtcggagtcacacgaaatccaggaaagggtgtttggagtgtaaaaggagacatgtcaaggtgagtgacaattttactcccctgaacccgtcggtggatgtggttcgggaatgtgcctgaatcgtggctcaaatagcctttacggacggcggtgatccaccagccgagacccaattctgacggaaaggccagtgtgacgagggcatcccaacatgtactctgtgcaggaagcgaaagatggagtgcagatatcctcctccaaatgaagacgaggacagccctatggaatcatctagtgcccaggaagaaacagagagtggcactgtgaccctaccaagggattccacacaagcaacacgcttgcttgagacgagattattccaccagtatatgacttcaacgtaccatacgctgtcgcaggatggactgtcaggacaccatctctccatgaccattcctcgcatggccgcatcttgcccttacctgcttgacagcatccacgcattctcagccttacacttggcctcggttgaaactgataatcgagctttatggctgaatcatgccgtgcgatatcagagccaggcatgcgctggactaagtaaggttcttccagaaatctcaccaccagattatgaaccagcatttgtctcgtccatcatcataatgctatttgccatgggatctcgagtactgtctcttgaaaatcgaacactggacccgcttttggttgttctcgaggctcgtacattgatgtccggccccgccatgcttttttcccggatacttgaaggcggggttgacgcacagctggatggatggctgtgcactcctgacacaccagaaagcctcgaaactgggaaacatgatcagtatggacctcctgctctctggctcatcggcgaaaggttgaataataacatgaaacagtggcggcaacccagtcgagaacacacatgtattatttagcctgcacacgtatgttccagcgatgtatagagtgacggtgtagggcttgcgaagctgataatagaggcagggatttaatgatgtcgttagttcgacttcgtgcgatgattgacacaagggaaggatcggatcaaccgatctactatggcacatggcagcagttgcatcgggccatcgagccgtggccaaaaattggaccgcatggtggcccccttgcatggcccttattcctctccgacaaattttcctcgctgctccaacatggcgattggattgcccgagttctgtttctgcattatggtatagctatgcgtctcctgcgccatcgatggtacgtgcgcgactggggtcgtcggctagtattggccacactggaaacactggacaaaatccctcaggagtgggaggagaccatgtcgtggataagacgagccgctgcaagggaggattagtcacaaggatgataaccagatcattcggggttaaatattgacaacaaaggaaagtccaactgatcaccgaatcatatccacggaagcaagaggttacatttagacgatttggagcatggaatttgacccaatgactccgaaaaacccccgcgctttgacaatttgggccctgaagctacccggtggcttatcggcggggtcgaagcttcgggggttttacacttaacacaccgctacgcagtaggtagatttaatggtattggaagacacgcaccgtcaagatatctgatccttgattcctatccttcaatccctcgtccctcgatgccagttgcattttctgagcaacctagagcccgccgatcctgaaccaaagcgtccgaagcgaagctggacgttctccaatcgtgacatgcaacacccctgtcgaactagccaagatgtggagaaacaggtacagctatctctccaaggttcccctctcggttattgtttttgcccgattgaaaatattaatattggatggcgtcttagcttgagttggccctgccagcatcttcttcccctgtaccgactcttgggcattgcgtaccgcagagaaattggaggcagactctagtcaacatgctacaaccgatcagattaggcgttttagcgattctatcgctgctgttgatcgcaattcatctacccactgccaacaccttccccttggagttctccgagcgagacacgaatgctggccacgggtcgcacggtaagattggtcctggaaagctgggcgctgttgctagcgaaagctcaatctgctcgcgccatggatctgatattctggagaagggcggaaacgctgctgacgctgtgagtatctctatctgggttcgttcgcgataagggtgaacctcggtactaataatgacatagttggtcgcgacacaattttgtattggtgtcgtaggtgaggctacatcaatccgctcagtagtcgtatctgagcattgctaacggatacagggatgtaccacagtggaatcggtggaggtggctttatgctcgtgagatcagcaaagggtgattacgagtttattgatttccgagagacggccccagctgcagcattcgaagatatgtacaaaggcaacgaggatgcttcaatatacggcggactagcaaggtaagacaagtacgcgcagcagatcggaaccaggctaacaatactagtggagtaccgggcgaagtgcgaggtctcgagcacctccataagaaatacggctctctcccatggtcgactgttgtgcaacccgctatccacacagcccggcacgggttccctgtcacagaagatcttgtcaaatacatggcatctgctgttggcactggagaggacttcctgaccaagaaccccacatgggcaattgactttgctccgaatggaactagacttgggttaggcgatacaattacccgacgacggtatgcggatactctcgagactatcgcgcagcgtggcgcggatgcactctactcgggccccatcgcggagactatgatcaatgctctacagagcgagaatgggacaatgacgctcgaagaccttaaaaattacactgtcgccattcgggatatctctcagattaactaccgtggctacaagatcacgagtacgtcggccccctcgagtggtagtatcgccatgagtattttgaagatcctgggtacatacaaagatttcttcacgactgaacaatctgtgaatttgagtacccaccgattggacgaggcgatgcgatttggatatggcgaggtatgaatgcctaactctgatttcacgggtggactctgctcaatggtcgcttacatgaactacagagatctaactttggtgatcccctgtttgttgacgggatggccaagtatgagaaggagattttggaacagtctacaattgacgacattcgatctaaaatctcagatgtgcgaactcagaacgtatctgtttatgatccagccggactggaaagcctggacacgtaagtcctgcttggtgcatcattctttcatataaagctaattctatatcagccctggaacttcccatatcgcagtagccgaccacactggccttgcaatctccgtaatcaccacaatcaacctactatttggtagccatatcatggtgccagaaaccggtatcatcatgaacaacgagatgaacggtatgtccatgaagccaactctaggtcacgggattaactaaagatctcacagacttctccattcctggatcatcgaactcattcggatacatcccctctgtatctaactatgttcgccctggaaaacgccccctttcctctatcacgcccgcgatagttgagcgacccaatggcaagctattcctgattgcgggatccgccggaggcagccgtatcatcaccgcgaccgtccagaacattatccattccattgatcagggactctctgccgccaaagcgttggccaaaccccgtctacatgatcagctgattccgaaccaggtcagcttcgaatacacttatgataatgcaacggtcgcctccatgaaggcacgcggtcataatgttacttgggttgctccggggcagagtactgcccagctgattcgggtcttgcctaatggaacattcgatgctgctggtgagccaagacaactcaactccgctgggtattctgtataaaatgggatatattgtgtagatgccgaagtacatacattgtcaagtgcgcatcaatatagaagacatcgcatcgctatgaatagatagaccggtctagcaagttcaagtctttcgcaatgcatccctttgttgtatattgcagatccctgctagagtgacgtttctttatcgggtggtccgtgctttcgatattcctttttctgatgtaaagagctctaattcacttgaccttgtcttctccattagaagtctacgctgacgtgaaaagtcgacatacatttgtctttttcttgagtttcatatactagtttcattgacacgagatcgcgtcgccgtaccaaatttacacgtgaattgtcctgcgttcaagggagctagccttcgtcgtgatctccccgagaagagcacgcatttgactgcacagaagacttgcaggtagctttttctactccttgattgtcgttgagtttgcattaatcagactactttttatctgaacagttcgacgtaaaacaacccaccgcgttatgtctacgaacccttctcacttccccaacttccgaccctagacaatggctcgactcagcaatatctccgtcgtcgttcctcttccatcctttgacatcaatcccctgaagaaatttgatgaaaacttctttgatcgtgctattgacgacatcttgtctgaggaagcgagcattgaaggatcccgagacgagatgatggacggcgacattgacatctcgagccccttcgggtatgatggcacgtcggactcctcaaagcccaaatttcgtcgaagccaaagggtcgaagacaggttgtcgcaattttctacaccgtcgacctcctcgcctgcaactagcaaggcacagaaaccgacgccgagaaaatcctcgagaaaaacgaagcatatgacaatggaagataacaatagtaatgatgaagctcccgtgaatcccgaaaacgttacacgacctcagcacgaaaatgaagtcataaaagttcagtcctgtcccatccacgaggccggtgatcacccttctacacttcccggaatcactgagtctcccgcaatgccgattgatgacagtgaaaggacgatcgaagacacgatattcgattcagtgggtctagaaaagcggattgaggtattgaagttcatcgcatcacgtcctttcatgataaaaccggttcaaccggttcgtcgttcggacagacgaaaattcaatagccaactgcgcagtgtcgctgcagaggctggactgggcgacacagctatcgatgctttgattgagcacgttcgaggtgtttaccttgaggagcttggaattgtggcagcaaaatatgccggctctgcatttggggatgaagtggacggcgaggaagacacatacaccgagcgctcgcaccgaaaacggcgtaaaagcagctccggtcacaccgaggacgatgagcgtaagaaaaacaagaggcgtcactcggatccggcaaaaccgcacatccacgatgctctgcagcatgatgagccaaccaaggtagtgaaatcgttcgaggcagatgctctagaaagtgtccctactgaaatccaggacaagggttatgttgagctggatgaactgaaacataagaacaacacaccggatctacccaaaatgcccacgaacttcgttctgggtagccccagttcacctatcgacttaaccgacgactcttcgccctatggcaagtttgtctctcaattcaaggatgttttgcttcaaaaggaacgtgttgatgacatcggggagttcaaagatcttgacaagagcaacgaagaaactcttacacgtcgcttgtcacttgacgcccggaaagaggatattcatgagaaccgatcgcctgaaaaagtggtcgaaataaagccgtcgaagcgtcgtgagtcaagcaaagaatcaaagatagaaagaaaccgacgcaagcgcgaacggagaaagtcgcgcaacaaacattacatgaaaggtgactccgctggtggagcagagaagcagcttgaaggccattccgccgatggggcatataaagaccgaattccgccttccactccgccgcaaacctcttctgagaattttaatggaagtaatgcaagcaaacgaagctccagtcagcccccgctacccgccgatccaaatctgtgggatgaggatttttgagtgccagtgatttgccaggtatgactccaagtgatgaggtccagtctaagtatttcttaagagccgacaactccagagttggctcgaaacgtaagcgggaaacggcttcctcgctgtacaatttgtctatcccccctcaaacccgaaagctgttgaaagatttgaatctgccctcggacttcttgtcgtcggattcttccttgagtgatgcaccgagtgattttgattttgattctgattgggatgatctagatggtcatccgttgcatattcatatcaatatatccccccctaaaagcccatgtcttgtcccccaatgtacaaaccctgagcctaaaactccggtgaaatgcacctctctcgttaatccagaacgcgttaaaacccctcaagccaaagccccgaagcattctccttatttcccacctgtgctagttaattccgaatcttgcctcccgtttccccctatcgatgggtcttctttcggactcatccaggaacagcttgcacacgacccctttcgtttactcattgcaaccatttttctcaatcgaacccgcggtggtgttgccctaccggtcttgttcaaggtttttgaacgatatcctacgatcgaggcaatggcagaagcagactcaccagaactcgtctcgatgataaactgtttggggtttcaaaaccagcgtgcaaggaaatgcattacattggcacaaacatggctatcagaccccccggacaaaagaagaagatatcgcaagctccactatccacgaaaactggacggtcgaaatgttggtcgtgaagaatgcattgatgaagatgatttgcgagtcgcatgggagattgcacatctacccggagttggagcatattcccttgatagctggaggattttctgtcgcgatgagttgcgggggaaagcctccgattggaaagggacggatgcgacagaggtcgggtttgtgcctgaatggaaatgcgttctaccacaggacaaggagctacgtgcctatcttacatggatgtggttgaaggaaggatggatttgggattacaacacgggtgacttgacactcgcgagcgacaagatgatgagagctgcgcagaatggaggggtcgctcatgaagaagaggggagttgggtactagagacatcccctgtcaaggcagtaaatggattgcatgaatcggattgatatcctgaataccaaaagtttcaaatccactgatgaagttacctgtatatgttgccttaggcagtagaatctgtgttcccccagacaggtttcagctgagagggcgtttgtatatatctcatcggatttcaggcttccatgcagcaaaaaccacgtcagttgaaagagcggggccgagatcgttcaccgcataatcgcatagtgcgtttctttccacttccaacaatttcatgcgtcgtacctgaatgaggttattcgtttctttttttcaacttgagatcacattttcttcccccagaccccagacactcggaatgccggattggttcccgcacattgcgaccctaagcgacaagtcacgacggcagcccgaactaagcgccaggagaattggagacaaaaataggatcacattccgctcagtggcagtgcgactctagacaggtaacggacgattgacccttcgcgcggtccacaactcgattttacggatttcgccatgtttcctgttagactaaaccgcgacgataggaagtcgaagaccatcaagggcacgaagagcaagacaaacaagacaaacaggaagacctcaaccaaggaccccgaggatcctcccacggctcgctcatcaacttcccaacgcaggtcctccatgcctggactcgagaagtcggaggcagcctcgttccttgagtcgagaactagtctaccgtatcctaccttctcgaaggcccacagcaaggaaggcgtccgagcgagtattcctaccccggacccgaccgacttgacacatgacgaggggaagaacggtcaccgcgaggatcaccatgcgcctcctagtccgcccctgactggtctcgaccaagagtcgaggaagggcagtattgggaaaggcagtattatcaacgaggatgagaaggagacagacaaacccaagaagagaacaagtatcaaaatcagagcctccgaagtcaacaggtcctcatcgagtctccggtcgaaaccagatgataccaccaagtccaagtccagcaagacgtcacgaacggagacccctacaaaacacagaacgtccaaggatgagggtgaagctttgcctcgatcatcgagttacaagtctaagacgaaggtttccgatgacagaacgctgcccaaacgatcgagtcgctcgacaatgtctgcctcacagtcgaacgtcacacttcgtgataacggtggagagtcagtcaacgggtctgatgcaacgtctattgcccctaatcagcagcattcggcgccacgaaaacccatgaccccgcccgcgaagcctccctctcgcacgcagaaccgatcggccatgtcccgtcgtcgcactgctagcgacgagtcgatcgattttgtgaaaccagtgaatccaaattcgttcggcgcacccccgccgcccccacctccacctgaaatgcctgctactatccctcgagtcgattatttgctgaaaaatggtggtctggaaaacaaggtctcgagggcactgctggctagcctcgggcaaaatgatccattttcacaaggacaacctcagtcccaggctaacgccggcaaaatctttgatccatatcaccgtttactagacgactaccaaaaggtcatgagtaagaatggatctctggccgtggcaacaggctatcggtctgtcgcccggcgtttattggatcgcctcgaagccgtgttcgcgcgcgacatctcttcggagccatgtagctgtcagatatgcgatcgaacggaggcagacggtcgacctgatggggtgagctggggcgaggttttggagctcgtgtctggccgcagggaacttcctatgtggcctcccttcacgatggcaccaaccaccgtagataccggcgtgccaggcgatgagcatattccaatgcagaagcttgacgttgacgttcctgaggaataccgggaccacttcatacggcaatctcgaaagacgaaggtcgctgtcgacaaatggctttatgagcagaaagatccaggcaccagtgctcccaacgaggtcgacgacgaaacgttgaccttcgccatgcttacgcatctcgaaccccgccagcggtcgttgttatgctctttgctcggcatcaattcctctactcctgtcccgcggtctgacgatgagatgccccggcacaagccttcggcgcttatctcatcggcctcggccatccagcgtctttaccgactaccctccctccctcgcgatccagaaactgctatgtacatgttgaataaccctacactccaccatgtcctcgccaccctttccgccatcagcgatgacgagtgggaaattctcatctccggccgcttcgacggattcctccgcagcggcgcagaagacccaggccccaccaccggcgctcgctggagcggaagtcgctccaacacacccttaggcggcagtgtctcccgaggaccgacacccaactatatggacggcagcttccgaccctcaagccaagttaacggcgcaccctcatcccccgcctcgttcggcgggccgattgctctagacgaggaaaccgaaatcgccgccttagcagaagtcgagcgcgacattttcctcggaatggaagcccttgaagatgctttcgaagccctccactgcaaagctgaagtcgttcgacgtgcattgcgcgaacgcggcgccggcctctccgtggcaagccaaagccgccggggttccttcgtcgaagcgcgcctaggcacacccttctcgggtgtcggaacgtgggaaagcggtggtgaagacgacttcctcgacgacgagtgctctcttgcgcccgatgactcggctagtaatatcagctcgaaccggcgtcgtcggcctaagagacgcacggagcgacgcacgcctgcgcctgtcgaggaggaagacgaggaagatgatggtcttggccgtcgagatacgcgtccctcgaggcgtagatagatcggcacctggatttgaatgggaataattcttttcgatctacggagtacgtacagcgttggaattatccgaggactgtttgctggatagcattggatatggatgtaactgttgctgttgcaatgggcttgatgaactcatgataccccctcctactttcttgtcctggcttttcttcttcgtttctcgcttgttcttttgcttaactccacgcttggcctcctgctactttttatattttgctcttttgatgatttatgaatactacgagcttccctccccctaacgactagccatgcctttaggctatgatacaagtttgattgagcatatcccagcggttgagttgttagtactgtgcaatacaagtgaattggatctaggtattgaaatgatccctcgggacggactagataattaattccaacaaatagtagaaaggctcagtatcaacccccaacatttgacgcaatttatgtcttgtcgatcaacacacaccgccatctactccagctgccgcaaaggaagccggagaacacccccggcggcaacaggagccgagccgcaccgcgtcgtggaaaaaagtacgatgtacgaatcgcaagccgtcatcgggtatatcttacgacatcatccctgttgggtggatcaaatgaaccaatctcgacacggccaacggtttgtgatgcggacggccccaaaccagccgctccagccgcactgacaagcgtatgctaaatgacgcaaagaacaccatttgcggagtgcactgcaaagtattgatcaccggagtctcagggtatgatctgggtgatcctcggaagaagaaactagttgtgctaaagatcgataggctaagatcataagttaactaaaataggaaaacgggcccgtcaatcgaagcttcaattatgataggctgtgtgttatgtgtacacggctgaggatggagcgctctataagcggactatttaatatttgattaatgatgtcttaggcacattttggttaaattgcatgatgtatttgatcaatagatatctaaaaatgcaaaggagccccgagtgaagatgtatgctttaaggtcaaagagtggggattcggcaattggatagtcgatttagtgcttacaacataggggcatgcagtctgaaactgagctagttggatttctggaaggttaaggttctgaaaagaaaaggatgagttggaaaaggttgctggggatttaccccaaattcatcgccggcacccaatataaattcggctgttcccgattacccctgacgggatatctgagacatttccaaattgaggcattcttttgcgtaagcaccagtttgacgatttactccgttgatctcctccactagtccgtgctagccagctggaatcataccggacataaggagcctcctttatccagcttctcggaacactcgtgtctgtcccgtctactccacttgacagacgatgttcgtggtcggagcggatcgaagcttagcccggcttacggcagtgtctaactagtgtgctatatcggattttcctgtctatagtacggatctatttataagaaaggggattgtatctctataaggctgcatactttctatttgtaaaggtatatatatcagaagggggttaggcataaaaaagaggaaatataaatttgtagagaacgaaataattattactccgtagttaaagactgccgtaacctggtccaatcacatagccaagaggtcaagtgaccccaaatgccctaaatacataatccttttgttaaacaacacgggctattgcggggtggatctcacataaaattatgttcatgccggggtcctggcccactcgcccacattgtgctttgtattattttttctttgttcacttgatgtattgaatatgatatagcctaccgatcgatcttacgatcgtaaatgcctttgagcggttcagaaaagagtctgctggcggcttttatagaaagagatggcgatactttcaatatcgtagagtacaaagaatttaagatacacttgtcccaattcaccctagctagtactccagaagcctcggccccaaatggaatactacatatagggtattaaaggtccaagcccgctgtcaattacccaatatggcgctttggccttggatggattttgcgccttattagtggttctgagaatcaggggtgcgtctcctatggaacccgtttctaaacggccaatgcccttttttagtatgcacttaataccaactaagctaaactttgcggccgtttcattcgacatcccgtggcaaacttgtgtccttttacccacatgagcacgtatgccctaaataggataagtggagtacaaatacgctgtatacggggattcacagctctgggccgtgaactattatggagatcggaatccttcgtccaggtgtccatattttccactgactcgaacttgccgtggataacccagccattgaccgacaaaatggttaaaccggtttaagtctcattctcctatccttgcctaagttcaattagtcctagtagcctgggtttgtttctttctctctcattgaatctgaatttcacctttcatgtctgtcacctcttccctccacgagctattcttaatcttccactgcaggcagcgcgtggtggagatatagtatttaccaaattcaacctctcgtctattcacattcgcgtcggccttggatgtcgcctcttgttgccctggacagtgaccccaagaacgtgctttgcagcctacctttcgaccaggcaatgatagcagaatcttagaaccgaaaccatccgcaaacacattcgaccatgtcggcagtcattctcatgggcttgatacccggaaacaagcactcgttggcagctcgcttgaccacctccgctcaacttactatcgaccctctttcagaatcacatcgagaaggtctaatagcaatttcagtcttggccttcctctctctcattgcaacatcaatactcctcggtttcattacctatcgactttttttctggcgcagcagttatacacgttacatcggttacaaccagtacatcattcttatctacaatcttgttctggcggactttctacagtcacttggatttattatttctctacaatggatcttgacaaacaagattgagtctagttccgccgcatgctttcttcaagggctgtggctgcaaattggggatcccagcagtggcctgttcgtgtttgctatcgcgttccacacattccttttagtcgtctgtggacgtaaaatgtcccacaagttcttcgtctcattcgtggtcggcatttgggcatttgttgttttaatgttaatcatcccattagcacaacacggtcctggtatctttgtgctttccggggcctggtgctggatcagcgatgactacgaaatcgcgcggttatggactcactacgtctggattttcctcgccgagttcggcacaatcattctctacgctgtgatgtatttccagctgcgccgacagatttccgcctccgctatcctcgacaacagccagctggagagtctcaagcgcctacgccgcgtcgtgggctacatgaccatctacccaatcatctacctcgttctatcgctacccatcgccgcaagccgcatggccacaagccacggcgatacacccaacattgtattcttctgctgttctggggccatcatcaccagctccgggctggtcgacgtcatcctgtacactctcacccgccgcaacttgatcatcgactcggaacccagcgaagaccgctcctatcacaattacaacggcagcaaaggcaaacgaggtgggaacaacctaactaccgttacggctgatcccaagcacacagtcggcggcacttacattgatgagattgaccgcaacggctcgacggataacatcgtttcacccaccgcacatggctaccacgcccgtgatcaggaaatgatgccgatcggacaggtctaccaagaaaccaccattgtaatcacacacgagcctgcttatcccaccgaggaatccagtaagcgctctagcaaggagaacttccccgaccgtccatctcaatcaggatggcggggatgaacctttcttcacttctattcctatatccattttgtgatatgatgccctcaatacccatttcctgtcactaccacaaatattcgttccctcaagctgttttcactaccgcttcatgtctctctttatctccctcgtcttcctctgttttcttcctcttcctatgtctgtatactctcatcctaatccttttttatgacgaaaccttgtatgtatattttgaaaagggacagaacgtgttcgtccccacgtgaaccatggcgattcgcatgtgatagttaattatttcgaatctgaaggctcgtgatttggttttgattgaaagaatatccacataatttaaatcatcatcaagagccattccatcgtgactgaaaatggtatcccaaaacgctaatgagtttcagcagtcgaaggatattcccatcaagaaagctttttacagaaatatacacgttcgaacccatcctccattctgcgatctgtttccataaaccctagtttcgcgtaaaacccaatattctcaaacatcttcacattagtgaataatgttacactgggaagcctctgattttgagcttccgcttccgcgtggttgatcatatagtatccgtagcctcgcccttgcgctgttggatcgactactacgttgtcgattttgagcgagtttgtctgctcgtcctggtggcaggtgatcgaccccacgatccgctcattatctctcagaacgagaacttcatacgtttggagcacatggtcccagtcttctgtcatcggtgctggtggtttgccaatgcgttcaatgtatttcgaataggcggcatcaaccatctctttgatggctggtatgtcttcgactattgctttgtgaagtgcgagcttgctgtccgatggggaccttgggctgagagttatggtcatgatgagaaaatacagagtgaacagtttaaaaatactttatttgggagtttcgcgaggagaatagtcacaacatattttcccttgagttgtgagtcagaactaccccgccaagcgacaactttattgcactctttactcaagccagacatgattctcagaataaatccaatttgacggagctaagctaagaccttcaattcgacatgtatacttcgaagaaacatgatgtatcacaattgacaatcacgcagggggaagtgcaagcttcccagacgaccaacgcccctgagtccatacatactctgtaatcgccgaaatctcatgaccagcctggaaatacacccgaacctccggacgcgggccattcatccagctgatgcaatcaatctgcgttcccgggatacagtccgcgtggaagtgtccctcggtccaggacttgccgtcgtacaccatctcacacatcgtattcgaagtattgtaaaagacccgaattccgacggtttccgagctggtcatatgactagtgcaagctatagacgtccgaggttggacttttgggagcttggcgcctccaccataccagccgcgtttgctgtcgtagcacttctcgatgatgccatgctccatatgctggaaatacacactatcaatagctttagtactatcccgtgaaagaaatcccgaaagtagcaattaccggatatttggttcagaagtcttaaacacggtgcacgttatgtctgtgccgggcattgctgagcccaggttcgacattgtctcccagtttccattatctattccgctgtgagcagcggtatagcaataatgggttgatgacttacctttcagtccgtattcctgaatcgtgttgtttgccatctgacaatagaccctgttggtcacgtcgggtccattgaggtgacaagcggccagctttgaacacggtgctgtaataaaacactttttaccaagactaccttcataccaccctttagatttgtcataagtaacatcattgatagtgttctcggtggagaggtagtagactcggatctatgcaggttttgttaattgtgctcttgatagcttttcccggagaacactgacattttcaaggtcacttgaggtgcaggctagaggcgagtagggcttggccgaagcaacgatattcttctctgttccgttgctccatttgtcatcgtacttcgactcgcggatctttcccaggacatcttgcatatagacccgtaggtcactgcctgaattacaggccgcgatggaagtccctaaagaaatgatatcagccctgatggtttaaggagagtaggatattccatacgaaagacaatctcgtgggcttcgttgctgggcataatgcgagagttattttgatgtaatgagctggagtttttcgcgctgataacaagaatatttttatttagatcggaaagatcgaagaggtttataactgcaaaaggccaacattatgttttgcatgtcacgaggtcatacaagctgcctatattgggcacgaattctggagcattggaagagctctgattgtcggaatatgcgatgctttacacatgagtagccaatattgtggcacatcacgcaaacaaggcccaagaccacgaggagctcgcggattgtcaacgcacaagggaacaaacacttgttttgaacggaatgaacctaccggaatctccggtgggtggcaaatggtttcattaattgaggctctgggcaacgttgaatatgatgccatgtgatgggcggttgattgtactacgctatgctatatatgcagtcatcaagtcaagattccccgtcgtacagttcagagtaacagctcaagaatatgcatttggcaagtattctcggcgatatttcacgaaggagagaaatttggtgttttttcccgatgatccagtcgagaagtttgacattcgtaggctcatgtaggccaactggtcgcctacgtactcatcgagctccagattttatgatttcagaaagcctctcacctgttgaatcacagcctgttcgtgattctggtgttaacgtccggtacaatgactatctctccgctatcaaaatattgctcgaactctgaacagacaggaagtttactacgaagggaaaatatgtcactttcttttccaaaaatagcatcaactgttgtttgtccgtgcataaccgaacaaatatgtagcaacaatataacggaatgatttccattggtgtattccgtattattaggcaccctccatcataacccccttccagtcactttgctcgtttttgtttttcttgcgcttgtcagcgcccgtccacgataatgtttatgctcatctttagtgtagtgaaatgccgtataaatgtggctcggaggtctctctagccctagcccaagggtcgatcatgatatgctcggcctatcatatgcctagtcagtctaagaataattgtgtagaaactcactagttggtactgggatcgtaaatattaggattgctagtagtttcactagataaataagtgagcgaaatgggctttttgaggcgccagactctcagattcttcatataattaattcgggttgtatgataaaagctcggcgtgacataggatcagttggataagtgcgcgcgatcctatcaagtcacgtgattatgtcttatcttatctacgcagcgtagataaaccatgtgatacatcacgtgcagtattttctcgccaataattgctgtgtcagattgatttctgcctccgcatccatcatctttcatcatgcgaagaatactacaacggcttatgtggttatggacctagcagtttaatgcaatggcgaactaaatccgattgaatcggatgattttgatcctatcatggcgcagatacggcggcaacatgaggcggtggattttgagattaaaaaacgatgagcagcagtccacagatattacaggccgtcaacatggatattcgatactcggctgctgggaaggacggttcaccacagcgaaggaagcactcgatctatatctacaatcatgttcggtaccggtcatttcacatcgacaacgccgtgtttttctaaggttgaccaatgagatgctgctctgcaggtcgacattgaagttatcgtactatattatctctgtatcacccgaaaccatttcgaggactggacatagaattcgatctctggacgaggcaagtagttttacatgagaaatatgccaggacacctgtcttccacggggatgacaaccttggaatggagcagctgacgttagtgcataactacatagtctgatttaaatggtatgtagcccagaaaatgcgcctcgtacagctatctcgaggctaatcgcgctcaagcggagccaacccgctgaactcgatttagcccccgatcgatccgcattgcattgcagtcaggtccaggtaaactcggtcgggtcgactgatcaaaacctcaattgattgaagtgtcacattgcaaggagtgcgccaatatcatggcttgtactccgtgcagcgcctgataaataaatactccaccccccttgatagagtggaataggaagattaccaaattgactgagatcagactagttttgctgcaaggctagttccttagattaccgtccacctgcgtacatcttcgtgtttcagtctcacaacgaggcgatcattgcagatcaggggtctagggatccactatagtggaccaggtttattttgatcgccaatcaaggcaccacagccgcaagaatgtacaacaaatatcttgttagaatatgctgtaatatgtctaagagccgggcttgaatattgaaaccgtcttatttaaagctaacatgtgttgccaattagtatctccgctcgagaaggtccgacccattcttttttttttaatatctcccaaccatgttgttctctcgcaacggtcttctggcacctttggttgtttcgctgcttctggcaggaaatactgtcgctgatgacgcaggaacgagagcccggaatgcactccaaacccttcagggctggtataacccccaaagtggcatttgggatacctgtggctggtgggatggtgccagctgcatgaatacagttgcagatttagctgcccttgacccatcggtgatggatacagcgacatatgtcttcaataatacattccacgtggggccagtgtccaatccgaatcccggacctgagcataagactgtttacactcgtgacaaccaaccacaaacttccgtcaatgctagccagtggctggatcaagcttacgacgatgatggatggtgggcccttgcatggattgcagcatacgatgtcaccaaggaggggacgtacctagaattggccgagggaatttttgagagcttggtatgtatagtgtcagattctgtgtgtacttggacatttgttgattctttctaggctgacgcatggggcaccaactgtggtggtggcggtattccttggaatcctaccagtacatacgtgaattcgattacgaatgagctatttctctctgtcgcagcacaccttgcaaaccgagtcgccgagagaaaacagtattatgtccgctgggctcagaaggaatgggactggttcacggcccaggccttcattggtccaaacggtaccatcaatgatggccttttggacaattgtcagaacaacggagatactgtgtaggcatcatgttctctgattatctttatttttggctaacctgctgcagatggtcgtacaatcaaggagttgtcctcggtggattggttgaattgaacatagcggcacccaataacacatacctgccatctgcaaacaagattgcaaatgcagccattgagacattggccgattcgaacaatatcatccatgaattctgtgagccacaatgccttccagatggcacacaattcaagggaatttttattcgcaatctacggatgttgcagaaagcatctccacatgatatttaccggaaggtaatagataactgtgcaaatagcatttggaataatgatcgcaatgaacaaggacagttcggcgtcaactgggctggtcctattgaggcagtagtggatgcatccacacacagctcggccctcgatgccctggtcgcagctgttgctgcgttgggtacctagcgatggaatccagaaccatggatatttctttttttttttttaatattttctttcggctattctttcaagtatataattcttcgttctacatatataccaaacatcagaccagctttcacggttcaattgttttattctcgctttctagtatgactgtgctcgcttggtccagtcaggctgtggggcggcctgaggtctcgtgcatcctgactgaatgacggatgtgggaactaattccaaccttcccagtgttcaccctgtctgtcctgtgaccacactgtcaagcctcgtggttgataataccccctggaatcgggaaagccgtctgggggccaacgtggttgactaaattagatagaaattagagttggtggattccggatgaagaaccatggaaccgtgtcccatgaaccaaagggtcacatactatattttccgaattgatacccgttgacgaacagctggcatctgtaattgttgcctcgagtattttgcttagttatatcctgaatcgaattgttaaacaccacgctcattgcaatatcccatccactggggatattcaacccgaaggatactgcatagatcctaacacctgcgtgcgataagccatctgtgactgggtttgaaaattcccattttgagcttggtggattaggataatggtattcttgtctctcggcatacatgtcatcttcattcaaaggaccacgagctagatcctgatactgctcttctccaaggttgcctgtcaatttccacgagacatcggattgggcgtgacccgaaatctcatagtttaaaataccccgtgggaacttgagtgaatcagtgccaggagcccctttatcttgacccatatgatcacccagcactgagttcacatattggcttccctgcgacaaaggggatgacagcgacatgctgtggacaacagtggagtcggcgctcgacccgatccacgagccaaggaatgtattattcaaccatacagtctgtccgaatcctgcgccactagacaattcaaccaaaaattatattcttggccattggcgttaaaatggccacggtatagcaaagaccctgtgtgatatccgtagtccatggagtacagactactcggagtatccagctgttgtggactgtgtgtggagcttcgtgtacagcgcgtccaagctgagtcatcgtacaacacctggatctcagggagagaattgatgaactttcattccaggttggacaaatcaggaatgtccaacatgggaagattatacctgacagttccctggaggttcccattgggcatttttgaagtctatagtacttccccattgaaggtgatgcctttcagctttgtagctgaactaggtatgacctcgattattgttgtagcattcacatcccctgtcaggcgcaactgcttatttatcagatcagctgtgcggataagatatccggcctcgacaactaccaggctcttcgatggcgatgtgtaatttccaattggacctgatacgggcaactccagcacccagtagttgtatgcctcattccgccagagcaggtatacctgaagatctgctacccgaatgatgagtcgtgctggtgtaacatgccaccttacaacccaagcagatccgtgttgttttatttcgatgctgtctccttcgataacggttggctttacaagatgactaggcagaccaaatttgtgtgtttctctcgcgcctccgtacagaattactacacgtgtcgatcccgacccgcatgcccatgtgaatatttctgcagagtagatcagattgatcccgccgacatcgtaatctgtaacgtgaaattttgaatcacgtctattcaacgtcaggtggcctccatagttgaggaattttgatgtccccaatacttgtcaacaatgtgagagtataccatgtgttatcgactgaagtgaagtcggcatgtctgacaacgtaaagattcgtcctcgtcctatttccaagtagagcagtcacagctattgaggagggtgcgccgtaagtaccgttcactccaagatgaggagttgccgtcaaatatccgggggaactttgaggaagttagcctcgagtttttgttcactatatttctcgcgccagatcgtcctctcttctgtaatcgcttcaccgtagtcatatgatgtatgcccgcccatatagccgagattaccccagttggtgcccccgaaagtctgaggagaattccacaataggcattacaatataaaatcaagaggttgtatggacccaacatgtaaatgttgaagatcttcacgccaaaactgtagttgttcttgtacaaaactctgacagcctctttgtttaccaaccggccgcacatgtcttggaccagccctcccctataattacattagttcctttcatatggtaaaagcaagaatcgacctaccatccttcatcagaccctccttggaactcagcaatcgaaaaggcgtcgttggactctgccgtctgtgcgtgacttgccagtcatatggaaacttgtaattaggcaaaacagtaaaatttgcgcctaagggggggaatctgtcagccttacagcacgtataacattgaggtacgttggaaacaagctcacaattatagcgcaaggggtacgcatcaatagcgttgatatcgactgcgcccttccctgaccccggcgcgaagtatcccataaccaagttatcattcacaattgaaggaacagtaagaccttcatcaagcagctgctcttcaacgtataccatataattccgattcatctcagtcgggaagtcagtcactccaagccaggtggagtacttgttctctggctgaaccatgatcactgggccaccatttgtgatctgtcccctgtcaatgatccggcccagtatcgatatgtaatttgctgttgcattcaggtattcaggatcgtcggatggaataacccccttttctcgtagaacccacccaggtattccaccagcagttgtttctgcgttgatgtacggtcccggtcgagcgatgaggtataagccagcttggcttgctacgtcaaaaccccatctaagctccatatcccgtcggtgataacgtgtccaggattcccttctacaaggctccaatcaatgtagaatgagaccccggtgaagcccatactctttgttttttgacacgtcgagccaaagacctgggactgggagtcgaaggggtgaaattcgccaggaaagatcatgagccgctctccgcgtattattatagaatgttggtcccacgccacctatccctaatgcgttagtgaaatgatactatcagggtgatactattctcactagatcttgtagccccttttttttgaggtggagtatggcttttaatagacgctaaaaccaatgatgcaactgcagaaagcagagttatcaatggtgacgttttgaacaacatctttcaggggtggtaatcaaactatgagccggcagcgagcaagataatcgagcgagacaataaggcaaacggaaattccaaaatgtttctaagcttgaaatttgcatctatttccccgcattaacaaaaccgactccgcagcaagaagactgctagcattgatcctattgaagggatatttcgccaattaaccagcgcaccggtaaaactactacctgtcgatcatttcataaactacggagtagacaatgctaagtacgagacatcatcccctctatattcctgacacctaccgaaaatcaggctaaaccagattaccctaacgtaattcacatacaagccgccaccacatacgacccgccatctccaaaacatatagtaaacaccatatttgacaaccttatatcttaacaacagtgttattccctgatctaattattcctagatagcgaccgataagaatctttaactcagcatctcaatattaaggtaactaaacctctactattatggtttcaaaaattacgttgcctagagcttgaaatatcttgaaatatatatatcacgatcacaatgtcataaatcttatctaaacttagtaaagagactagatatcacctaagaagtatcgagctataagaaaaacctcttatagactaccgttgttaaaatatcaggttgtaatttatcatatttactatgtgttttggagatggcgggtcgcttgtggtggcggctcgcatgtgaattacgttagtttctggggaaattacatcagtttctggggaaattacatcatggcgagctcatttcgccatcctatcctatgcctcatttctagccactcgggatgagatttcccttcgacacctctaccgaatactaagtgccaaactcttgatccaacaatggccgcacatatcaagccactcatccttcacgcccatgccacgggcccaaacccagtcaaaatagccatggcactcgaggcgctccatgtcccattcgaagtgaagttgtgggactttagcgacaatccgaaaagtggcgtgaagggcacagaatttctcaaaatcaacgagaacgggcgcgttcctgccatcgaagatcccaacaccggtgtcgtctcgtgggaatccggggcatgcatgaactacgtccgccgtgtttatgacaatggtaatacgattggtccgtctggcgactcggctcaagatcttgtggattttgaaaagtgggagtatttcttgttgacaacgcttggccccatgacaggacaggcaacctggtttaagtcagtgactgtgaattcggaagaaatccccggttgatacttactctttatttgttcagaaactataacccacaaaagaatgatgatgcactccagcgatatacagcgcagagctatcgctgctacgatgttcttgagggtcagttgaaaaagactcacggtgaaagcattgtacccagtcgggtcactgccgttgattatcattttgagccttgggtacgcgcctcgtcctacgctggcctttcacttgacaactatcctttgatcaagaagtggctggggcttatggcgacacgggaagaagtccaggaagcatacgtcaaggttcaaggtaaaaagtgaatgagatcataccagggaaggacttaactaggactagaatcaggtagtcatgaaaaattacaaatccaaatacaaacctcaagtatgaagtaaatatcatgttgtacatttttgtctctatatatttttgatcacgaatccaaaatatcaaattttgaatgtccgatagctgcctacctttgtactccaggcaccagaacctttgggacatcaaggagatatagcaaatatgcctttccattgtgcgacttgcttggcattttgcctccacgtacgttgacctgcatagcctggtgtacaagcttaggctcaggcatctggctgtcccgctgagttctccacttcacaaactcatcctctgtcgtgtgcttcttcatgtgcttgtttttcttctcctgctcgccaaccgtaacatacggcaatggctcccgtgcagtatattcgttggtaggaggataatcatggcctgtgtataatctcgtttccggcgggaaagaaaggaggcgtttcatcgagcggtaaagttcccgaggatcgccacctgggaagtcacatcggccactgccaacatctggattgaacatacagtctccggtgaaaatattgctcccgaatttgtagccgccgtggtctggagtatgtcccgggagatggagggcgctgctggtgacttggccaatctggaatatttcatcgggctggaagaggtggtcgaaggcgttgtcgatatctgctttcgcgattgcatattttcgtgcgaaaaaactttggacgatcttgacattctcaccgatgcagatcggtgcgtgaggttccccgcgggaccagagaatttgttggatatagtaggctgctgagaggtggtctgcatgggcatgtgtctctagcaacatcatgatagtgtattcatttttcatagcataatcaatgatttgatccgcagattcagaggtaatagcgaagttcacagtatcataatccaggactgggtcgatgatggcagcttcctttgtttcaggacaagctactagatactgccaagagcaagtcttaggctcgaagaaagggtgaactctcggttccactgtgttggccatcttgaagatcacttgcagaatatgctttcaagttgaaaagtaattaaagttggtgtttcctcgagtacgagcctggctggttggaattacgtatttatagaatcatcagtgccacccagcatagatctagccttaccctacctcaaatccagacagatgggctcagcaatccattaagtgtccatgtttttattctcattgtaacttcctatggggttcatgctctcaagtcttttgggtgatgttttcattttcctccgtgccaggacagcgtattacttcagtcaaaatacagactcaaacatacacccctagaatgatatattccgtgactgcgactatatagctatgaaacaaaagaggatatgattaaccacccccatgtattccatgggactcgtcaagtgactatgagaaccacgacttcgggaacattcacgagaaagcccggttcgctatttggtacagacctacaggacttcaataacttcttatgttgatgcactgccactggtaggtaagttagcaggtgctacgggaccctcctcttacgctatctcatggtgcctatagggagatggtggccagggggatgagaggcaggagtccttttataccccaaacccacgtgccttcctacagtgcccaggtgccttgcaccttccctaagcaacagacatccaaggttggaaagattcttgctgagtcagaattatatgattccaaccttccaagttctacctttccgtttgggcacgaagagaaattaaccagattaaggagattaacggcaggaacagtgagaataagactttggtgcctcttagccgtatctaccgtatgagtttacagtctacgaaaatagaccaccgactgcttctggtttcaagggaataaacttcaattgataaatgactgtattcaaatttctttctaacccattgaaatctctttcttacatctgtctgtttagtgctaaccattgacccattgttttgtcaagcgaccgtccttgcagtcgcagacatttcacgcatacaaagacatcccaggtaggagagattgtctgtaggtatggaatgcaaattttcttcgcggattctccattagaaagcgaaaccactaaaaccgataggcgacgatcgtttcccgatagaaccgtcgctgacagaccattgatcaatttcgctctggtcacttggtacgtcccatcgagcggtttgaagatcaagagtgtgagcggcttgattgaatcggcactgccagctcttcacggccttgcatccgggcttttggcataggtggcccatgtagcatttgattgatcggcaagcgccgccccgagtgcaggggtgctggaggagcatgtatcgcagaacctcaatgatcacttcagagacatcgctgtggtcataggtacagctcatgtcaccgcactctcccgacagatggtagctattacaaactttgtgttcttttgctcgagcgtggtactgatcaaaggcttcaggcgacgggtgaggatagtatgggtcgatacggtccccgtctttattgactgggatgaattcttccgttttgatactcggcaaggggagcatggacctaaagaaatcttcggagcgcccgacaactgtaggggaagaccacagttgtttaggtgaatcacctgcacctgagtgtttaggcgacggctgatgattcaatgactggttcggcataacgtgctgtttattgcagccgatgccgaacttgcagataccctagataaatgtcaattaagaacttactcgcgactgacatcatgtgatcaggaaaaataccttttggaagtgcttgcagattggtttggtggtatttgcaccattagcaccatttgtgccattagatacgtagtgtgcactgttttcaccgttgaatttggccacagtcggagacgcagccgggcctgtaggtggcttgctgttaagtagaggggtagacatgaaaaccgaaggtaattctctgatagggagatccaagtcctcgaattcacgatggaaaccagcggctttgatgagggtgatacggtcacctctgcctctatatggcgtcagcagggagccgtatccagtgtcgtggcagccagcaaaatagatatggcggcattggttgagttcaacgaagagacggaacatttcttgatttcacagcacacatcagtacaacaacaagattgttcatgccggattgttcattacctctgatcttgaaatcactgccttccttcttctctgcagcatcgacataatcaaatagctcttgtgcacgggtaaatgatgaagtaaatggtgacatggatcgagcctcgtggcccataagtccagctcgagctaacgccttcgacaaaccgagaacgttcgcatagacacgaaccatgatccgacactgttcggcctgcattcccattgtcgaatgcataagctcttttatagagtcgctcagttcgcgggcagcatttatgccaccttcgctgccatgcttcaagaaatgttctttgaactagaagatgtgttagtcgatggatttgataccgaggaaagcaagacagtctcaccagatatccgtctccatctacaaggacaaggacaaaagggttacgatcctgattgattgtcagtttcaagctctatggcatcctgtaagcctgcctcctacctgccctctggcctgtcttttgtatttctctcggccttctttaacctcttcatagtcacttttgagcgagctatagtcgtctaacagactcttgaattggctgagcaagtcctgcagattgtcatgctgcttttgctgctctcgcgataaggacagtagatgcccattcaaggaatctatatcagaatccctcagcatcttgtcggaggtaccgggacggcatgtgccagtcccataagccaagttaattcaacgaaggctgcgagcattcgattgaaatttgaaagaagaacgattttctaaactgtgaggtgcgctggacagctatggtggggaaatttgtttggcttgttgggcggtcaatggcccctaggtatcaggtgacccctggcggaaagtacaagacgttagttgtgtcacgtgcaagacttccccataaacattccaaaagtggactagcgttaacgcgacccgcgttcagcctagtggtctcgctcctatccaagttgcaaaccacatccaacgtatacaacgcatgagcacgaaaaagcgaggagctactcgatctagctacgcatggaatagatatgacgactatctcccgtcatattgcggttatttctcgtttatcttaagggattttggttttggaggctaagagtcactaggtcgatcacctgtctaaagctctggcaaagagtatgaggtagcatgccgagacagcattaatcctgtatcgctttatagtagctctaatttgtctgaagtactgtggtctccatacattgtatcaccagggagtagctcctgtatagttatgaaacacttactctgcttattacaaacagacccaaccaccatgtctaagtaacaaaccaaaactagacctattgatttggaataatcttcaatgtaaggatttgctcctaggaatacatttttttgaccgcacgataccatcctcgggccttgcttctgctcgggtgcgggcagtgaacgggtttcagacaactagtatagccaaaaaaaccacaatagtacgtggtgatgagaaattacattgcaaatactctgcactaacaaggggactcgtttaaaataggttaataataacggtgattgaagtggtttccagcgggaaccattcattattaatttatttagggaatagagaaagaaggaaaaaaagaacacatgaaaaaggaaaaaggagatgatagaagagacacaagaatatcaatctcttgggagacctcttcgtggtatgcatacacatcatgtgacctcaaccccagcgccagacatcttaggctcctttgttcctttttcccgtattccccttttctgcttttgttttttttccctgaacgtctgtcgggacttgattatccaggtcccaggcgattccccattcttctaatcatggcggttccatgcaatatccggggttcggcttcccagctcttctatcaagaccaacaatgtcctcaatatcaagcccttttggctatcaccgagatgccgcatccagatcgttctattgtgggcgcttttctcatggatgcacgaaatccccaggaagcagcccgctacttcttacgagagaccgcaatcgatggcacctcgcactccgtcccagcaaggacaatttcggaattcctctcagattggaaatatttggtcagcatgtgtaagcatgtcatagttatatccaaacaagtttatcttgcttctattcctgacttgcgatcgtgtagttcggcctattgtagcaacagggctgtccgctgagacccagcggctggtgtatgaaagagacggcgggcgctgttgcctcacacaaacacaattcaagtcaccggaggattctgacctgcactttgtacacatcgttccaccacgggtgttgatgcatccggatttagtcgagggggtaagtatattcattccatatcatgcggtctttgttgacactagcacacaaggctcgcctatttgagatgctttacgcttttctgtccaatgattccatgcagtcgcttcggtcgatccttcccttgaactcgtcaatggagagacttgataatctctggctgttgtcggtctccgcattcgagcttgtagaggccggcgaggtatggcttaagatccggagctgggacccgcaaaattcaccctacagaaagagtgtagatcgccatcaagccctttatacgagtgcacgctgatttaagactaagtatagcatcaacaccaacctgtacaggtacaaaactcggagtgaaatgtccattgctccatcagcaaagatgttgcttcttgatgataaaaccaccgataaaactcctatcccccacgaagctctttttgagcttcatgccctattttccaagtcactggcatggatggagacacggaggcacatgatagaacaacgggatgctcccagtaggtttggacctcgcttttcctgatcatttctaatagctttcaggtgcaaacatgtttcggttctcattgttgcctacgctgttatttcgcaccatcagacgaatatggaccaccctgccatattttattcgatatagagcgtatgaaaagctccattcggttggcttatacctctatggacaatccctttctccaagagtccaacggctgcctttcgggctgtatttacgcaagggacgaccgcaacaggcagttcaataccgggcagaggctcatactcttggcatggtggagaaattcactcaaatacctgcgccaagagcaattgatatcttggaaacccctaatgcttcatatttgctcatgacccaagtcccaggccgtccgatcggccagctgctcaatactatgacggacaagcaagtggaaaacgtggtgaccgacctaaagcggtacgtcgcccagctgcgagcgatccctaacgaagtcagcaaatttcaaatctgtaactctcaaggtggcgggatcctggactggcgcatccctgatagccagtcagaggaattgcgcttccaaacagagaccgactttcacgactatctgactagaattatgacggaagatactcgaaggcatgcggccaaatcgcatgccaccccacacgcgatcgtatttacgcatggagatctaaatcctaggaacattctcgctgagaacggcaagattaccggcatcgtcgattgggagaatgcgggcttttttccagagtactgggagtacactaagatgcattacacagttcgcagcttgactcgatggctggttgatgtcgttgatcgagtatttgagggctaccgggacgagctacatgtggagaatatgctatcagatttatcaggccccttttaagcccaaattatatcatataggctttctagataggataaagcagaacttcatttatgtttgggatgtatgtaaagttcactatgtggcagtatcatggctcctcttgctctcgccttctttgatcttatttgcatcgtctttggaatatctttcgactcggttactgaacggccctctcatgaagacaacccagtagtgatgaatcaaatatccaaaatgaattcaatccaatccgttattgtcgacctcagcattgtccgcacctccctctacctcatccttgtgcgaatagccccgttcgagtaactgggcttcgatcacagagatatcacgcggaagtacgattattccattcttgtggagctccacaagtgcatccttcacccagattcggcaggaaaatggctctccggtgtttggagagtgagagtagtcgaagggaaatgcgtctaggatacttttgcaggcttcgaatgcgctagtgctgagggaggcgagcttaaaagccaggacaaggctcatggagaagggaacgtcactggacgatcggggcgtgacgttccagccgccgcttcgattggtcgcgtgtcacacatctcccactggagtgttggtcgggatgaacaacccccagtggaagcccggggcagcgcctcgactgctgagcaagacatatagtgaatagttctcatacagacccgcaatctcggagcttggtcgaagaggcatcttggcggacgaaggcagatgtgcactagtaacgtggatagtgcggatcgtaaaaagtgtggacagaaaacttcagatgtggaaataagggaagtttcgggggggatggagaatgctgggaggagtaaggagataggaaagatccagaaatcatgtatattttatacacggaagggaggctctgcccaggagtcggcttgttgcctagctcatgccagcgcacgatatgcgtgcatgcatacggtgagtggtatgataggcaagtgagagtgatgtgatggacagtcaacatacactaagcgctaagtgcctcgattgaaaccaagggctgcccagtggcctatagagagagtatttcaaagaggggtaatgcacccccctgttaagttattgagaacacgaccaacctgcttgttggtcatgttgataccggcagtgaaatgaataccaaagggtgtatttacttcataaaatacacgtataccctcagtacaaacttgcgacaacttagcatgttagagacgcttcgaaggcaatcgtttgatatgggttgcccatacggctcttcgacttatattccagctatttgtgttagtatatagcactcataattcaagcctaggaacccaaccttggaaggttcccagtctacaaataagacatttaatgagaccggctgaaacgaggtatcaaggcgaaccgattgggaagccatggggtaattttctataggaccgggaaccctcctgcgccacatggtgatttaggattcttgattatttcacccactgtgatgtaaaatcctggggctagtaatgtgggattatttgcgggactaaaagcatagccttggggggtgtacatagggcttgcaaagtgactgggtggactacatagccaagtccttcatgttttctgataactagaaacagtatagttcggtcatcagccagtgcaagctatgtagatcttataattccgcagcgattcgttcaaactcaaatctcatctcaatattgccaaaaaccctagctacaaggaaaacaccacctccaatcaatgtgatttacacatcaatcggagccttgactagttcaagtcttacgtcgttatgtatgataaggtttccaagtacaattacgtcctaaaatggtttgtccgatttataatcaactttggttttgctttcaacactattgctttccgctaaatctctttcaagaattcaattgtcatggagacaaccttgaatcggtgggaaagacttctgtacatatctgagcatgtccatgactccttgctgcaacatcccaagccgcttggacttcacttgacacgccgtactttgatggcctcatccatgctgctgtgcctgaagttgcctcgtatctagataatactcggttgctggtgggcgggatctgtcaacatcaaggtcctcggatttcttacatttaagatcgtctagaccctaaccgatgaggcgcttaaagtcaaggagtataaagataacgagaagcaccgtcgcgggggggccgaggccggtaagaacctcaagaagcggaagcgcgagaccggtctattcgacccaggggcgtactcccattgagcagcacattcgtgaggcctaccgcaagctataggctactctacagaaggccgtggctatgctgttgcataatggtcgggttcctcaccgcattcctcttgcgttggtgagtatataaatcttctctgtatattcttatgctaacaatgccaagatttgaatcttcggaattgacgccgcttcatgaattacgcgaacggtagcaggagtttgcggacgatacccaactttgtcttgttttatttgagtttattttgtttggtttaatgcaagcgtctgaagttgacttgtagaaattcgggattgttaatgggacccctcatgcctgaattttgacagcgaaatgcacccattctgctaccgccttcccagttaactacaccgccctcctaatttgtaataccgctcgttctccctcgtttttaactggcgaatatttgacttgcagaatatggggtacagcaggtacctacaatttgtatatgaacccttaacaatatcaagtcacttttctagaggatggcgacagcgaggttctctaagtagaagatttacagtattgaatcagctaggataagcacttttctgtaagcatagaggtatatcttttactatgtaaaccagaagtaggcagaatacatggcagaaaagataaaatgtggcagaaatgtagcagaattatgagtggtactagatcaggaaggcggtattggaaattaggtaatttgggggcggaaggacgggaaataactccgccttcccctgtcccaacctcagaaagtctcatccaatcacgtcacacgaaccattcccgtttggctgcatcatcatgactctgccatccgtcgttagtgatcacgatgattctgatttcgttctcccaccccagacagataaaggcaagaccgagacaagcatgtccttcacttccctcatgtctgctcttcccacggactgtatcatacggaacttttcacgcttcaagggcctacggcttgaagctaagcagttactaaagtctctacaagagaagggagatggaaaccagttcatcgttgtcctcaatctatcggccctaacaatcaaaaagctcgacgaagagcatcagactagtctggggggcattgagtatcgtttccaatgggaggggacgacagggctgattaaagtggttccgtcagaacgccatgatgcagtgacaaaccaactcggtcgagcaatcgacatgaagcttactgcaatgggactaaggtggtcagagatgatctggactggaacagctacatacaagcctactgtcggtgtaggtaaacagggagatcacgcattcctaccaccaattcgctgccccaatgggcttccaagtgggtcatggccgacctttgtcatcgagacaggagtttctgaatctctccctcggctccgcgaagacgctaagagatggttcataatttcccagggtctggtgcgcattgtcattcttatctcgattaaggcgactgaagtcacgtttgaaaaatggcagctagccccccccggtgccccatccccactcactcgagcatatcttgattcactccgcgcgcagctcgtcaatatccctccacttaccaaccaaccgactcccacccagcaggcatactcagcgcaggaggtctacgtccggcgcaacaatgttgtcggggcccccttatgtcttccatttgtcgctgtttacgaccgacttccaggaccaggagaacatgatctccttctcaacgtcaatgatttcctcgaaatcactagaatcttattctgatatgttctagtttgctctcggctcactgcccatcgtccccagatgcctctattctgttatggtctgctatcgggctccctgcccatcttcccccatattcttcttcgattttccgtgtattctttgagatagctctacaaaggactgtaccactattgacctataatctatcccatttatcagggatctagtacgtacattttccttaacgatccgagctagtatcacgttgagcttctcgaggtcgaagtacaacagtctaccctagaaagattcacccacttccacagtggatttactagcgtatagatcaacatggtatttaatatggtattttactactcatactaaattactgcactttttttaaaaaataaatacagtgatctcaatttctcaactttctcaacactccatttctgactatttaacacctacctattatcatgtctgcccactcaccggaatcttcatattagatgagaattactgatcaatttagcccgaccatatttggcctcatcgttcagggtctcaaggtctttctgtattcacatctgaaattatgtccaagggcgttcaatttgtgcaagcattcatacatcacaaggacacagaccgcttcttatccgccatgatttcataaatcgcgtcgatgtaagccttggcgttggcgttgcccatggcccctggtcccattttgttcatggcataaccaatagtcatgcggcgatctagatccatgaccatcatcgatccacccaaacctcgccagaagcaaatgtttccttcggggataaaggtgataacctccggcagggcgactccaagcccaaatctgatgttgaggtacaacaccatatcgaacaccgctaatccgctcctggagcatctggtcgatagtctttagtccaagatactgcttcccatcgacagtgcctctcagtgacacacttgggtactcccaactcctgtactagatcgtacttagtcgttggctcacccaacctaatagaaaccatgcgatcctctccgtatcacactatgaaacagcatcgctagttagtgcttggccattttcattgctttgtcatccaggatgtttgcccggcggatgattaccccggatgtggccatgattaccagtacctgataagagacctcctcctgtacaaataaccacttttttatcgagagtatagttgctttcaaatatatggataatctctggcttctgcttggacaattgacgtgacgtcgctcaagtatccttgctacacacttaactatgtgggcaggctagtttcatatgcgacctacgtaattatatggacggtccgctctggattctaagagcgccaggatgaataaatacaggctgattccatatttgtgaatcatgttggttttgttgattatctctaactatcaaatacttcagaatatcgtcatacccgaaccaactatatatatcacggaaacccgcgagagaaagccatatatcaaggctgtaaaagggaacaaggaagctgggataattgtcgagaagagctacattaccagcaagcagctcccagcagccatggaaagccctggtgttgcgcgacctaacgcagcggtatctttgggaaaccttgagggtgaccttgaatgggccaggaaatgtgacggttgtatatatatgagtataatgcccttaagatccatcacccttgtgctaaattgtagaatgctctgtcctcggtggcaagaaaaacaaagagaagagacacaagactcctcccatctagtaggcgaggctggtcattgcaaggtcttccacgttggtgcttctactcggggcaagttcatcacagtcttcaaaatctccgaggatcttatcgattacctctgcctggccactcacatgtagaaagtttccaatggaagcgtggatttggagaagtctaggatctggaagttcccaacttccgttatgaactccgaaattaataatccgattttcaggtaagagacggcttgtctttataacggtatccggaaaggtcttaattcgatatcgttgaggagttccagtttcctcgaaaataagtctgaaatgaccgaattccttatgaatgtcgttatctagcatcatgatattattctccgaattgatctgttccgaggtaaagcacatattgcgaagaactgggaagtagcgccttaggttaacccaaatcgctgtatttctgtgtcggtgattggcttgaaaagatccgagtgcaaatggaataatataggccgcttcaagataggtcgttactgcgttccgtggataggcgtgagcgtgactatacagccccgttgcaagacatttattaccatctctttctaaacagcggttccagagttgcgactgagagctaagatcctcaattgaatcttcaacgccagaatgcggagacagagtgacctcagtgggtattttaccaccctgttctttcaatggaatcaataagccggttttaatgctttggactagttgccgaagcttctcatcgtttgaacactctaaaatgtccacctccagattttcttttccgccaggaggaaggatctcgaggaagtcaccgaggaagtcctttgttttgtctgtaggttcaagtagtacgtagctgttcaactttcgatccagcctctggcttggttatgagtatcaaaaagactacctagaaggcataagcggacttaccgtctgggatgatgacatcactattggcacagtggtctaatctaattaggacaggtcaatcttgttgtgctaatgctgatgatttatagtcgtcccttgagcagtgaattctcttctgagatcgcgatggctgtgacgtgccaggtcttacaaagatagaagagtgcatcaattcaaaataacttagagagagagagagaagaagcaagttgcaaagtgggaagcggcctgcttatatggttgacctttgcaaacaatgcaaacaaagcaaacttcaaactctcgcttagcactaaatttggttctgcgaggtgctgcagcacttgtcaaggcctggtatattatctaggctttgaacttttcttttcgataattatgaacgtcaacttctcctactctatacgcttagtatattggtgaatgcccgagggccgttttataccccaactctatgaaaatttgttctcgaaaggagaaagtgatggagatggaactcagtcatttcgcgagtttttccagctaatgcatggttacaggtgcgccgctgatcctttcggggtaagtcttcaatatggatggtaaatctcgactgcacatacgaaagactttgggtggtattaagcaatacattcattttgtggcatgtagaacaccaccgaaagacagcaggtgtagataggaagtcaataaatacatagaaaaaggtatacaaaatgaacatatctggtataatgccgtgcgaattaaaaatataaccaaccacagtgcaactggcttccttcatcctcgaaatatttaggctgctttagcagtaggttcatgacctttctcaagtgccacccgttcctccgacgcggaagagaaagacacagcctcaccgggagtaacccgctgcgccgcatactcctcatccggtttccagaagtccttctttccatgaacggcacggttaacccagggtggaaggaagccaccctggagcttccaggaccaaggatcggactcttccttgttaggcgggacaatgcgaccaaaggtgactttctcaagacaccaggcaatgccgttcagggtgatgtagctggtgataccggcgatcagaccgtaggcaatgctgtatgtgaacggcatgatagcgatggtgaggaaggcggggatcgcatcaccgtagtagcgccagttgatatcggcggcagactgggccatcatcgcaccgacaatcacgagcgtacaacccgtggcccaaggtggaatggaagcgaaaatcggagcgaagaatatagcgatgaagaacgcaatgccggtgacgcatgatgtcagacctgttttgccgccctcggaaataccggcgccggactcgacgaatgctgtgacggggggactgccgagaagggatccgatggagatggaaatagcgtcgaccatgtaggcaatggcgctgccctcgaagtcttgggtctcctcgttgattgcgccagcgaatcgggccatggagtacattgttcctgtggtgtccagaatatcgacatactgccgagatgttagtcttcaacctctgcgtgtatatagagcttgcgacataccaagaatgtgatgaaagccagtccaaacttgccacccttgccggccaagttccagtcctgagcgacaagaatacgtttgataggatggaaagtgacaacttgcttgaagaaatcaaacctgctggttccgagctcagtgtaggggaagtaagtgacgggcgtagtgcgaggccacgagatgatagaaaccaacaagatacccataatgacagcacccttgatgcggtacatcatgagcatgaccgtcataataccgccgcagaagatgccaacccacatagtaggactgcgcatcttagtgctgctcagacacaagcccgtatcggggtcgtaattggcggggaagtccgcacatccagccaactcaatgggagtgtcagtgccaccctgaaccattccaataccagcactgtaggtcagaccgatcaatgcgaggtagagtccgatgccgacaccggtcgcgagtttgatagactttggcagggcgcgcgccagccactggcgcataccgatcaacgtcaagcccaagaatacccatccttccacgaagacggcgagaagggcagtcgagtacgggaccatgccgctaccacggactccaacaacggtgtaagcgaagtaagcgttcagacccattccaggcgcgagcgcaataggcaggttggcgaagaaacccatgcagaaagtcgagagacaggcgatggcggcggtggcggtgatgaggtcgcgattgacttcttgcgtgcacagagcgtactcgacattagttgcgcagaaatctttcatgtcttcctcggggcagacgcaggttccaccggtcagagaggtgatattgctgttgacggagatgatgtatgccatggcgaaaaatgtggcgaggccggcgcggatttcagtgaagaagtaactacccttcctttctctaggctgaggcatggtttaatatcacattcaatattactgcgatcgccgatcacatagaatgcggtatcacttacatggccagagccctccagacgaaaccatgtccccacgggactgcgagcaactcgcacgttggttttgtgaacccagttagcgaagcccattgtgaaagagtatcacgatcgtgtgtggtggagacagcgaattccggggatgctgtcgtctttaagacgcagtatttaaagatgttcccgcagtggaggtgtgcaggatatagggtccaagggagaaatagggcaaatctcaatgtgctctcttggccaaccacaagctgctgataagaagtcagcaaaaaaaattagtttcgcctccaaatacagttatctccggggtttatgccttggtggggtcgtgtttcacccgtaacctgccgtctggccgtcctcattggctataccgttgccgacagggttttgttcaacccttcgaaggttgtctgtgaacgaagaactcgacaaccaggtgatgaaaaaaagggtccggacattatttcaagtccctgcaaatccaacgtgtccgaatcaacccttggaacatccaaaaacgatctccatgtgctttcacaaatgttgcacatgaacattcctgcaatgccaagacgcccgcaatgccaagacgccggcgcgctcagccctcgtgagctgtctatcttatcgattttctgtgtgtcgtgttacttggaaagatgcagggttctcgataacggaggaagccgatgaccttaataaggaccatccatccaatatccccagtctcttggctgtgggatatccggcggccatatccgatcgtgggccatcacggaatctcacccgcagatatcggatgcgttcggtctggcacgaataagccttcatccatctgatttacatctcggtacgggatacagattggcatttgctggcacggatgtgctctgccaggagaaacaaggggttgcgtcagactaaaccgatccgctccgccacgtgaaccacgaggcaccagaaagtcaattcttctggatatctcgtgctgatctcttggatacatgcggaggacggcgcacggcgtatagacagtgcacagcagacagattatcttcgcgtagtatccacgcgtcgtcaccgttgctatcgcacagggcacgtgctggaagtaatcatgaagtcgcctcaactaggatttattcgagcagtctcttacatagagctatcgcagcatctttgccatccattatgcgccgcctaaagaagatgcacgacgtttacaagttgaaacataccgtgccgagggctatcgtccaatgcatcatgttccaccatcggtatcaacccactgggaaatggaaccacgcaatcttttcaaccttgccaatatactatcctctgtggagtgtgacgtgattcttaatctattcacgcctcccgaatgctgccatgtctgttggctccctggacttggactgacaagtgctcctgagtatctgatggtgtttcaaagcccccgtggcctgctagacgatgccgaccttccagcattgattctcaagatttatgatttaggtggaggtactggatttatttttagacataaaactcccaaggctaagacgctcaatggccgtccaaatggccccaattcctctgatcccgtcacttggcctagagtcaaaatcgatatctggtctttggacttggtacattgtctccttactccacactttctggattactattctcaactgacgtatgccaagttattccactttgccacaaatgaaatactctttggcctgggtgtatatctaccgaattaaacggaggtttgagacctctcatgttcaacttcgttcagagtgagagtgaccatatcacagtttatttggatgaaagactgcggcctgaattttgcgtagacaatccagagaaattgtcgactttcctttggtcaatgcaaccaaacccacaggattgcaacctatggccggccttctacggagtacttcatccattcaaaggagtgacccacatgagacacttcaataattgaaggttacaatttttaaaattctatggatttcattattagcaacagggaaattttatgtatgaaaatgcaaacgtaaaggtcgcgcctaaacagactctgttttctccgaccttgatggaagaggacgctcgaagactggagcgaacttagatctcttgcgcaacgcaggtccatatttgatgaatagcaagggaatcgggatcatgatgagtgccagacacccaagaagtgtgccggcccactgcacacccaagttgatgaacatctgcttcgagaacagggggaatgcagctcccaccgccgatcgaatgatagtattcgcagcaaagacagatgcggcactatttcatagtcagtacattgttccacgaaaaaaaaaaaaaaagtaaaaaaccagcatgcttacaatgtcaaatatgagtcaatcaagtaattgaagcattgcaggaagatgacataaatgccgaatccagtcatgattccgctggctgtgggagccatccaatggattgactttgtccatccagtccagccataccagaagagcccgatacaaaagcaaatacctccaaggatggcaggaggaagtctccattccggaatgggcatgtcattgttggcagccaactttttggtatatgccctctgatcataaaggagataggccccagctagaaactcgccaataatcaatccgatgaatggaagacttccaacaccgagattcattccgtggattccttggaatacaacggggtacgcaccgagaagcgcgtacatcaggccatatacaaagctcatccagagagagatctgaggtaaggttagtttggactggcttgagagattcacgcacaacttaccagaaaaacaattggctcggtgaaaagcatgcggaatggccgactgaaattgttcgtgatcagatcgccccaatcgagctcgatctcttcttgtctcgcgcggattccccaattgtgtgtctgccgtcgcaggatgacggctttctccacaaggacagcgggtgcataggtctctttcaagaaaagaagacaaagaccagtggccagccatcccatgaaggaggagatgtacatcgtccaccgccatcccagataagacatggtgatgaagccaccagtgaatggagacgcgaatggtcccacgaacacagccatggcgaacatagcaatagcgacaccacgcgtctggttattccaaatatcggcgtacacggccggaacaatagcgatcgggctagcagagaaaaagccagcaaagaatcgcgatatcatcaaagtctggacgtccttgctggtcgctgccgcaatggagaaaatggagtacccgaacataccaacgcagatcggccatcgtctcccgatgagctcacttgccggtgcccataccgttgggcccgaagcaaatcccagaacgtatagcgtcacaccgagcacagcgacttccgtgctgatgtgaaagtgagcactgacatgtccgaccgtggaggagaagatggcactggcgaaagacgaaacgaatgttgtatatgctagggtcactgatataccgattttgcttgcgagggaccagttctgggggtgcataggatcgtctgcatcgttgaattcgacgacgtattgttccgggtctgggagtgatggaggatgaggcttcccagctccgagggggagccactggtcacgcggtgtgattcctatgccggagccaacagttgagcgttgttggagtcgataagtattgattcgctctagctcgacttcgttgggattgctttggcgatgagtgaggcctcctgagggcatgggcccagcttccgacagacggcgatcatcaatcgtcgggatggtactgaggtcatcacttccactactgatagaatcatgtgggctgtgactccgatgagacatgctgaaatgctgaaggatacaaaatgcaattggattttagagacgaattttatctaggaaatgagcataatatatatgggaatcgaccaagctaaagatttggaacatctggttcccagggatcggacggccattttcatcactttgatggtaacagacggcgtcatcgagtgtagcttccccggttgatccgtccaaagtgcgacggcagtttgcagagcggtgtactatcagtcccaacacggcaatatgctccgagccccggtcgcgaaccacggtacgatctagacatcggaagtctattcggcacttaggaacaagatccaagatggggtatcataatagccactgtataccgacgggactattagcagtagactgggagagtctgagagtcagtgaagggtcggggaaaccaccgacagcgaccctactactagtacagatcttaaagtatagcatcaccaagaagtcaacaataaaggtgcccatttgtacagagtaatatctggtcattcacatttgtgggctttgtgcgatcattgcgagtgtccgagctttgaatgtgtgtggatatatcttcgggtatgaaaggatttgagtaaactcggggccttagatagcgacaatatagaatgaagggggttgacaatcaatgcttcaggttgacataaatatggcgatgacggtttcgaaattgtcatggcagctatttcaactacatgtagtaccgatactccgtaccccggctttcgttcaagtctctgaacccttaattctaaaaaaagaatcgcagaggaaacagctatctcccaaggcagggacaatttcttccaaatacatgtgggctggaaaaagaaattataatagaaacacaacgaatacaaaacttatactccgtatagcataagaagaaactggtttatgtctgatgaaatgattttcagttccactagggttagagtggggcggagcttgcctgttcttttcaagctctcaccaagcaagcctatctacccttggaactgccctaaaaatgtgatgcatcatatacagttgagtacgaagctgcatgattgtctatcctatgacttgacggatcggcgagtatctgctgtttgtttcatgagattattggctagttaactacgcgagatattcaatgtttgcaaaggggcagctatcaataggcagcttcccactttgcaacttgcggcttctttctctccaagttattctatattgaatgcactcttctatcttcgcaagacctggcacgtcacattaaatctatttgcttgatttgttcatcaatcttgaacattacccagcaaatcaagtgcctcttctgcaataagacgactagagggtaaaaatcgcattaatccttggattatatggagtagaggtttgagtgttggatcgggtaaaccagcaaactcccgttcaagcttcgaggttccgtaatcttcgaacaaaattagcaacagttctgtatatggatcaatttacttaccatcttctagctccagattatgtctagaattcctcagcattgattcccacttagacttccattcagccaccaacttctccacgaagccaatcatctggtaaattaaaatttcgtcctcgccaagataccagaatggccaagtcgtgaagaagaaggaataaatctacaattcgcggtaagtatatttccttcaaagaaatgatatgttaacttaccatgcaacctatgcgctataagtcgacgcgataatcaaagtggtcagtgaatatcgtctcgggtaccctcaatgaagccggctaggccagcttctgttcctatccttgataagaactctcgccgaaattgaggagccgaatatcttcatcgtcctcgtctatccactcagtccattctgctgccttgatcagttgggccggcaattcattacctagaggtgtgctattaacacgttttagcggctcaatttatgaatacaactaaatgcaatattctgactactgatatctaatagtatatgagtaaaaaggccaactatagaaagctcccttacctcgatggcatataccggcactgtgaatgaatttgatagcttttggaagctgcgtagaaattcagagcacagtttccgggtcgagtttatcgtgagcctgatggtagtccgagagaaccttaccaactgaaggccaagtaattcaaaaacaagacattggtgggtcccgttagggcctatatgtataaaggcatcaagcagctgaacaatatagtttgcagaaagccctttccgacattgcctctctagaaatttcaaaatgtgtagctctcgcgatatcgacgaatttgcggtcatgattttcaaggagacccattgatttcggctggcgtgagattagctagaaatgaatacagttgctagccccatcttaccgccccatacctggatgggggcggtaataccatcatcccaccttgtcagggaggcacataagacggctacaggataaaccgactctctgtctttcgcaagccatactgtggaaaagccaccctatcctaacttgtgatgtatcttctaacgatcattttcaaatgtatctccgaggttgactggatggtatcccccaggctgatattttgacaatgactcttgtgtataaagaaggttactttggcagaacagagatagatccatcctagaacgcaaagcggatgagagcagggaggcgtttgcgatgagaagttgcgatacattcagggtaaatttcgctgccaagttggatgactaaccaccctgggtgttcttgaattctactgtacgtgctttgacgaacagagtgagatcttgtccctcatcatattgtgatattgtacaaatccagttagcccctgtctagtgtcatgctcgatacctgatttcccttgcgccaaggcccgggtaactgtactgtgtgacaagggctgaatggatcgacgagttgaggccccggttttaggggctggttatgaggctcatacccaatcaactacatttaagcgctgaaggatcagtaaatggcaatcatggccaaatggcaattttagcctcgcatgactcagacaggattccggagcccatttgcgaatcgtctaatattgctttgcgctcacgagagtctagatccttcacgcccgctttaaaaacaaacacttatttctcctgcatgaggggctgtgtactctgtaacccgtaacgcataaattaataactccccgccatatcgctgctaggagatttttgacttgagaaccccctcaaactccccgagatgaggcaatcgaaaagcgccccctacggagctttaccaggcgaggaaaattactcgagaacatcagaattccaatcttatacggcaatcgaactccctgagatcgacgaccagaaatatcgaccccaaccccaacccctcaaggtctctcagttggatagaatttctcgtctattatgggacttgactcttgccattgtcgccttgctcttcacggtgttcggtatatgggtttcttgtatcgatggaaaaccggcgggcccggactccatgggctccaaactatttgaagtctctcaatatgttagttgccccaatcctacgctcgtcctcaagatcgtcaaatctagctgacaccgcatttcctcccaaaggcacccactgtattcccagtccttttcgccgctattgccggtagcagcatcaaaagtattgcatcgtggcgcatccagaccactggaggagcgacgatcgggctagtagagcaatgtctcggcagccagaatatcacaggagccattctcacccagatcaggctgcgcgcggtaaactttgtcgccgtctttactattctactatggtgcctgtctccgctgggcagtcaagcatctctccgggtgatttcaattgtcccgagttacccaggtaatccggtcgagttgaccactttaagcacttttactccgtaccagtacggctaccaccaaatggcaacggaagccataacatcggtcgctaaccccatgactgcctccttggctgcgggtaggatacttgcgacccgcaaccaagatctctggggtaacatccgccctcctgtgattgagaatctcgagacaaacagtacgggttggatgaatgcaccccaaaacgacaacttgacgtacgcgtctcttgtcggcatgccggtgattggcttaccaggctccggcaacacatcatttaccctctcaggctcgtatctatccgtgtcctgtcctgtcttcgacacaatccacactttgaatttcaccaatttcaccgggtcaagtgctccatcccccggtaatggcgacgattgtagctggacgagcgcatggggtggataccagtttatgattgccatctcggagccatgttcgtactcactcaacgcatcaatgacaaggactcggaatgcccgtaaactggtatgggaatcatgggatcgcggttacgcaggtgctatcgatgatagatcccccataacacgagccatatgcgacattacgacgacctatgtcgattccaacgtgacatgcgagagctcaggcggaattcagtctacaaacacttgcaacctgtcctccgttcgccggtcggtggatgaatcacatttccacaaaaactggactgtcttcgatctcaatttgccaggtgatcccgagctaccgaaaagctataactacggattgttggatatcctcactaccctgtatccctatgtcgagcagaatggcggtctacagcccttgatttgatattttatcgacccttataaccccgtcgtggacttcttcggcgagaatctcatgtcgcctaagaccacaaccccgaaagtctttggaacgcgtttatcacagatcttcaattccatgctctatctcggagtcagcccctcggcattcacgggctctgttaacatgacgaaaatcacacagaaaggaagccaaatcaagaatacccccgtcaaattcatggccaaaaacacccatctgcaaaatatcgtcaaatgtgaccgtccctggctcgccgttctcatagtttcttcagtggttatcttctgctttgcactggtgggcgcctatctccacctcataacgatcgctcccgatcttctaggatcgatctctgttgtcctattgcaaaataagatcgaaggaattgttggatcttcaacatggtcttcagatgaatggtccaagaatacgcgagacacaaaactatggcttggagatgttcagcctgaaactgacgttggatgtcttgcgttaaccaccgtggcacaagatgttcctgctggttcagtgaagcaaaggctgtattattgaaatgtatgctgtagctgatcaagaatggcattctcaggactcccaatctgagcttggcttggtgagacattatatgaaagacttcatgtttttatgtcttttttttatcatatataccagagcactagttaatagattatatttttcatgacacgtcactccaagctccaaagatacctaatacagctaaggctgttcctttgcatctatccattctcctagctacaatatataggcggccgaaactcatgtcctatgcttactatttacttgggcaactgtgaatgcttactaaaaaggctgaagagtacctattgaagaggagactctgaaactgggaaagtaggagcactgacagccctgtctgcaaaactggcgtgagaccagagttgtcactgggagtagtaggatgctagagaggagaaaaccatggggtaattaccaagaatagaaattgattgctgcttttatacacatgattacttggtcatcaaaatctggaatcccaactacactgcctaaataggaaggtaccgacaggtgaatgtgccttcaaactcggagatggaagtcataacaatgacaaaatcacgtggcgcgctcatggtacttcacgaagagagatctctgtgtaccaggttgctagtcagctcgtctctcatatatgcaatttcatcttgtggaaggcaggttatttgtacactagcaggagtagagagatttaagagaaggggaacctttcaagtctaatggaagaacaagcgagaagtgcggataagtgaagaaataattatagtggacgtagtcgtttcatgattgctgagcgtagtgcagaaggaattgacgagaagaaggggagagagaatgatgctttcctcttttgatggggccggatatcaatatcaacaccaagtggcaatgaagggaaaaagacccaaatacaagcttcctgctaacagaactagatcaaacacatctcgacacaagcaacaacatcagctaaaataaagcaacatatccgctcatgagacattagaaccggttgaaacctttcttgatattgtttccatccatctcacttatggggctgctgcccagttcagcacttccttcatctccaaccaactcaataatcttggacccagggggaggcctgaatgggcgcacggccgagtctgctgctttctccacaaccgcggtagtaccacttatcgatgatccagtagcatccgcctcatggggctcataaccaccatgctggttggcaaccgcggtgttctttttgttcctttttctgatgagaatgacaacgaaagcgactataatagcaaccgcagctacgacgccaaccacgatgcctgcaatagcaccaccggagagcgatgaatcagagaagccgctgtcagaattggctgtagacactgcggtggacccggtggggattgcggataccaattctgaagacacagatgaaggtgtggatatggatgcagatgcggatgtcgtagcggatgtagacgtcgataccgcgagtgtagatgtttggtgtttggcatcaatctccgtctcaggcaggacatcaaaagccgcaaatgcttcactggcattctttctccatatttcgcatgcatatcccgccctggagtcacacttgaggtcgcggtatatcgagacacataggccagatccctcgggatcccaggtaaaaagcttttctttaccaataggggaatttgtgcagttctgtgaatcttggccgcgggctatttcagtggcattggtcgcgttggtgtagcggaaggtccatccattcaccaggggaattaggaaaagtgcatataatggtatcatgacggcgacgtgggtcttttgaagagtgaatttaaggaaaggaatgaatttcgttgaggttaaatttctagctggtaaaagtccgggagggggaacatagcagtaatatatagaccctggttgctttgaatttgaaaagaataaacctcgtatttaaatgagcctcgtccgtggagttctagcccacccctgcatccagtgaaagtccccggttttggaccctgagatgactgcagcagccgatctatactaaggagggaaatagaccggtgaagactgaggagtcaatgcatattaacacggtctctagcgcatctccaggatcggaggccggaccggaagagtatggatgagtcgcgtgcgccgtagaagaaccaaactaattactttctcaggaagccataatataacagtaacaggttgaaaccgttctaacctcgagttatactaacgaccttcatacaacgggtatatagcgtgaatactacaccatgagactaaatatttatctgacacttggtggctgaccattcccgagaatacggggtacagtagtcctgtgctggtacttcctaccatgcctgtcagaatcatagtctaaatccaaatgcttttagctatttctgttcacattctgcgactagagtctcggcgggcagccatcttgtccgtggaaaatggtgattggtgccctatgtgccgaatacgaggtgaagaacatgcgaaaaattcagactgtaaactatcagtttgtctgctgtattgtagaaaaagacaaatataatgaatggtcatatctgtaaggccacacataaggagtttgtcgctatattgggtcattcacggcccggggcatcatgaatagagaaaagaaaaacgcacccagtcgccaagagtcacggaccgataatgcttggtgccaagggtctagtatgtctaagtttaagtaatttccacttacttaactccatagggcttctcctcggaaattatgatccaaatccgttctagtagcagcaaatagacgatcgatatagagcgtattattagggtcctacggtagaccatttcaaaatattctcggtgtataaaagcatacaatatagcaatgttcatgacagtattgaatcaaaattgaaatcacttacccataagtggatgagatgtttcccttcgatgaaggctccgagctaagactcaaatgcctgaggtattactcggacgttcgaatcaacagcaacatgtttgtgtaaagttttcccgcaatttccccggagatgaattaaagatcatactaacattgaaagttgtcaataaatatcccagatggtttttgctaccgcatatgacgtcaaaacacagtttcaaaggtatgatgctcacaaagtcatcgctggaaacgatacttgattaccattactctcaagcttggggacgagaatcatgcagtcgactagaaggccaagtatttgattttcttcatgtatacgtatgatagacatcgtggcccctttctccctagtccggttgtcatcaggcacccgacgagccgagagtagagtatgattgaaaggtgacgcagcggtgccggtaaggcccagggggtgtccagacttgctattttgtgagtagctattgctctgccacatgtggttatttttcagcatacttgaaaacttgcatgcgagctccttacatgcgcaagatctgtaaatagcaattggtctaagtacattgatcttgcagctcagcatgagactatagatgtagtataagcttgtacctcgacatcggagctctacggatcttcccttctggcatcttaactctgctaattgcaaaagccacggtaaagaatcgacagggatccaatcaaaccgggagcctgtcttaacttgaaggtcatttaagcacaatgaaaggtaggtaccagggcactcgcatcattgattggcaatgatccttgtccgtcgcttgccggaggttcctctaatgatcgaaaatcatcccggtgagcctgatcacttgtctcaggattctcccgacaagatcactgtcatctgctggagtaatcgtcgagctttctattgcagtctgaattccactgtggtctcacttcgtcttcagaagttttgtcattcgtgtgacagtaggtttctcccccgtgctattgatattatttggtcgtttctttcctcagctctccttggtcattccattgatgtagttctgatacaacgaggtgtgaaccgttgctgaatctgtcctctatagtcagtcatcgattgatatcgccacaaagccgcaatatctagtaagaatacatgcttcaattgtggactgttcattgaatgaggcagccgatgggtccattgtctgaccaggaactgatatgtaaaacagaaatccacttctaacttaccaccgacactatggcaccaaccaaaatagtccatcacaccaagtccgcatccctctctctccattcgattgtcgaaagaagcggccacaagggcaactgggcgaacaggaatcgcggggtagtccttgtcttctgcatcgttttcctcgttgtgatgggaatcttggcactctttgcataccgacgaatgttaagacggaaagctgaaaaggaggcctatgaaacgacgagtgattagttcatcacacactctgtgctctcgctataccaatttccattcaactcggtggtggacgacctgtgtgttctgttaaatttgagctgttgggatgggctgttcaacgctgttttgcttgtttgtgtctacgtgatggggctggtactgaatgggatgcctattggcagttcagttacgagagaatggcatggatgatgctcaaatgcgaaaaacataaactacttaagagttaagcatcaatagtaatcaataatacgttcgagttggtttcacttgcaaaaaactactatcgccctctccgtcattcctgcagttgcaatgtgcacctgcaacttgtacagaacttgacttttcccaatgacacccattctcatatgtgagaccctttacttctctagatattttccacagactatcaccattatttgtccgatcgtgtcagatccttgagatgaaattatgagttcagaagcaggcccgtctggtgttcatccaaccgatgagaagggaaagagaaaatgacccgagtcgcccgctcaagacctaacatctaagaaggtttcacttaaggtgagaggagtcgctgctgtcagagaaccacatattcaccccgagaagcaggaagaggatcatctcctggactatgtagacacatgtcccaaggggatttcatctcaatatccaaaccctgtgaatattggtggtacggtaaaatagaaactcttcccacgcggcaacagctaacatagaagagaaaagtcaccgtggccaattgaagcaattgccatgaattatcccacgttcgatgaccttggtaacttcaaaaatttcgtacgtgattcatgatgaggcagagcttgccgtgtatcttggactgcagcataaacacgacctcaggcaattcgctttttcctggccttttattaaggcatggatcagagcaccgcataatcagactatctcgctaaaattggacataaatcatctcatcaagggtggcaaagaactatcctgtatcgaagatccttaccaagtttggccgcaactccccgaggagtcagaggatgcttctttgcgaattacacacatcatggcatggcatctacttcaggtgtctaaggatattgaggagtacaccatgagcagtgatctgcataacttccaccgcacaaggagataccgcggtgaactaaacgcgatgttggagctcgatatcccgctggacaacatttttcatcctcgtccccagctaatgtcttggaggaacaagctggacgacaaattcgatcggtactggacaatcttggggtatgtttcatagatttcctatatggagtcctgggaaaaagcccttgagtttttcgcctcctcagaaaacaaggctaccatatacgacagcaggatgccgacaaagaccagaccaagacccaaccatcttaagttggctcagcagtgctcctcttctctatccttggacagatgtattgaaggcctttctccaatttaggtaaaggtaaattgggacatggaccaaaacacatatgagaacatgaatctgtgccaagtcctcgcaggtatcgctcatgagggtaaactgctccctccgatggatcaaatgatgacacaagaccctcgatgatgcaggactggtgcatcattctggggcataattcgacatatgatgtcttgtggtggctatgcattgaatttgtgtgatatgacgttgtcgtatcaagcggagatggataactgctattatcagatcgacgctttccgatcacagtggaaggtacttcaggggatataaatgaaacgaccgaactaccaccggtgtattgaatacaacctctcgatctcaacctgtgaggagtggcttttactgaggatcctttggcagaagcactcgtctttggttttgtctgtgacttccattgctattgactctctcgtttccttctttgtcgcttattccccgactcgataatttgccttgatgcaagctacgactctcaatgtatagtcggaggaccgcatagctgatcatgtttttattgctttaatatatatattcttagcccgatgggcttgggtgaatagaaatgttctcttacgcagggctttccaacaactgactcgctcatcacctagtccatattatgtacaaaaacctagaatagcatccttttacatatcaaaaaactggccgttggggctccagttctttatttttttgatattggcttgtatgttgtaaacatttaggggtgtttttatgtggagcacttgcgaaatgttcaaattatgcatgaggatgagctagatgatacaatccatacatctcccgcacttattgggataaattcggacccaatatgtacatttcatacgataatttgacggggattttgacgtaagaatacaatataggctcttatacctctcgaggtctacaaaagacatcatcgcaggtagccccacaataaataccgcggggaactttgagatttccttcccacgcgtcaatttctttctcgcacgcgttgatgctaacaatctcgatgggatctcccgaccaagtatgcgcttctttgcgcgcccagattattgtggcagaagcacaacttgctgggctcaaacgcgaccttgcaaacgccgaacaagcagcgcgatcggagaccgcaacgattgcagaaacccagcatgaggaggaccagaatggcgaagaaagacgatggccattgcttcaggaagaatataagcgatacgggcgacaaatgattgtttcgcaagttggcttgaaaggtaagatacggctacgttttggcggttggtttgagcagtaggactgatggcgatttcaattaaccacaggtcaacttaaactccgatcggccaaagttctgctcgttggagctgggggtctgggatgtccagctgcacagtatctcgctggtgctggtgttggcaccattggactcatcgatggggatacagtcgaggtgtcgaacctccatcgccaagtgctacaccgaacgaagaatgtgggaaagtacaaggtcgatagtgcgattgagtctttacgagagtgagtggatccggataggagtactgagctcggcgctgacgacttcttgtggcattcaccagactgaatcctcatcccacgtatattgcccatcgcacacatctcacacctgaggaagcacctacgatattcaaggactatgaccttattctcgattgcacagataacccggcgacgcgttatctgatctcggacactgcagtgcttcttggaaaaccattggtctctgcgtccgctctgcgcaccgagggccagctgatggtgttgaataacccgccccgaccaccgggcgacaagactggagggccatgctatcgatgtgtgttcccgaaaccgccaccggctgatagtgtggtcagttgtgcagatggaggtattctagggccggttgttgggacgatgggcgttctacaggccctagaggcgatcaaagttattactgcacccgaggttgatggaggttcaaattcgactacagcttctccacgggatcccccgtatctccatatcttttctgcctactcatcgcccctattccgcacaatccgtcttcgttctcgccgggtcaactgtgctgtgtgctctgccgagccaacggtgacactagatacaatcaggtcaggttcaatggactatgtatttttttgtggatccgcaaatttaccctcgctacttggtcccgaggaacgtatctctgcccgagaatacaatcaaagacacccgaacgtcacctccgattcgtcacagctccacaccataattgacgtccgagacgaaactcagtttggaatctgcagtttgcagaatagcatcaacattcctatctcaaacatcctttcctcaagttatcccactgcgttacagaaggctgatgatgagcaacaagctgcgcaagtaccttcttggctaccgtccgaggttgcatcatccgagtctacaaacccaatctatgtcgtatgccgtctaggaaacgactcgcagattgtcgtcaagaaaatgaaagaattaggactagatcagcatgggaagagattcattggtgacatccgcggaggactccgatcatggaaagaacaagtggattcctcgtggcccgaatactaactcaaccagcccgctatattcccacgcggaatctctgtccaaaactcatatattgtcctggttttacccatcagccagcctccaggatccacccgcctcacagtcaatgatgttgtgaggattaccacaccatggctctatctatatccaccaccaatcagtgcgaacgcgaccctcatcgaggttaccgagtgtctggaaaacaccacggctgacgtcgatgtcaaactcatcacatccctcacagcgatctactagagtgacatcaatacccctgtcaccccgttggatgtggatcaacctgccacaaagtgcattgtggttggggttgccgtctacattcgcgcggtcaaagacaaacacgagagacggcacagatgtggtctcccccgttattagaccagccgcaggatccaaccccggtctcatactaggttagatcaccgtcaaatgcctgggttgagacgggactgtgtgtgttgttccgctggctaggacttggatcagagttagcatggacctcgatggatcgtgaatgttaaaacaggaagaggaatcaaaaggacgggcaagtccgggtctatttacttactcgccgagatcatgagaagtgatgctttcatgaggatcaacgggagcgccaatagcaaatcccatgaagaggaatgccatcatggcaatgtcgaaaattgggctggatatcattgtcgggccatctccttcttgctttccagcaaagacagtggttttggcagtaaatctgaaactgaagcagggaggtttcaaacagcggccgaattcgctcggtctttatatcatttctttccaggaagagttcttatgctcggacaatgtgtgtacttacgctcatctaaatgccgcggagtatcagaggcaagagcaaagaaatcgatcggagtaacttgaatgacggagtgagtggagtgttttgatggaattgttaggctgtcgccatctgtatatcggaaacagagcagcactgattttgaacattgtcatctatttcattatatccattatttggcgcaatcttcctttcaaaatctcttatagagaccgttatccagacctcaggacattttcaagcttataatgtacgaaaaatcggaagatcggaggaagcaacataaccttaaagggaggaatacactcggcgattcattcggcatagaagacactttagatagttaggacaactttaggtgtagttccgtgatgtgtggtctacctctacgttccacataagtaagtccttaagatttaccaccttcaagcagagctgttatatgtcttccctgatttaatatctacttgggtcctactttgattctacaagagaagaactttgagaaagatcgcataaatctggagcaatttcaagtttggaggttccaccatctaccattgtcagtactttgtattcacttcacggcgaaagtcgacggttttcgcgaattcacgccatatggcctgcataccttcggtctcaatcccgaaaccgtgggtagcggggggcagataccggatggcagactgatccatagggttatagccaataccatcagctagatgtttagggtgaaagcgaaagataccaaatatagcaatgttattgagtctctctgacgaagctgagagagtccacgggtagctagcctgactagccaagcatcagccaggcaccaataaggcaccaacatgccaagtttactcatgcggagtacatcctcctcccccacatatggcagccaatcacaccagggcggggtgtactgcaggatcggcatttcaaaccgactcctttgctctttcgcattattcaactagacctggaggtttctccaaatctgtcacatttcctgaactctaccattttcccccatttctcagatccatgattctaaagtcacgtgggtgatgtcaaaacaacgctcctgaagattcggatcttttgtttttgttgctgagccgaggccactgtgtgacggcggtaaacatggcgaaccctcaaactcatcagtcgggctcatcctttgggtcaatgccgtcgcagcaggatgctcaagatgatacaagcaagaggaaaacgttattcttcggtttcgtcaaaaaaacatggcagaagacgggcttggacagacccaccatcctcttgatgatgaagtgagttcaggaccaagcctgcaatatgccgcagttgaaatctctaacagccactataggggcggtattccaccaactatagccatttctatgtgagttaccaacctcagaagttcccggtctgtcagaatcagtctaacctttaatccagctaccaatccatggctgttgccgacgagtacacgactttaggctatctcgtggctatcgtctcgattctgggctttgcgatcatgccccgcgcaaagtttatccaaatgatgatctttgacctcttggctgtctctatcgcagcatgtttcgccctgttgacaatgttctccagtgtccgggcgcgccaacacaccgctactgactctactgatccatacaattcttccgcgtccgctgttagctgtttgtggctgttctttcaaatctggatggttcacaccttccgcgccaaaaacccacagctgcagttccccgtgattatttacgcgatttttgcaaatattgcttcggtatacgcgccgcaaatgaagactatgacagccgcgttcagtatggtgagccaattgctcaaagccttcattactggtctcggtatttcaacagcgacgtcgctgttgatccttcctatgacgtcacggcaggtcgtcttaaaacaaatggcgagctacattggcgggcttcgctcgggcttgcatgctcatgctctatactttcaatcattggaaagggatgacatgttcggtcgcacagagacctatgatgatgcccgtgaaaagtttggcaaaaagggaaaggtctacagtcccgaggcagaagcaatccgtggtgcagtccgacagatcacggatatccacgctaaactccacggcgatctcacatttgcgaagcgtgagatcgcattagggaaattgggaccagacgatcttcaggcgatcttccgtcaccttcgccagattatgatcccggttgtggggctgagcttcgtggtggatatctttcagcgcatgtcagactataacagatggaataagcccattgatttaaatgagcctgtagtcccggaggatgtccgacggcgggtcgtgcatgagtggaatgagatcatgagggcggtacacgatcccttcgctgtaatgatccaaactattgacgagggattactgcatacgtcgtatgttttcaggctaacaaagacccccaaacgcagagctacagcgaaatctgaagatgacaattcaacggagcaagacaaagatgtggaggccagagccgataacactgctcctggtgaaaaagcatttatcgagtattttgaaaagaaacttcgcgaatttgggagtgcaaaacgccttgctttgcagacatgggccgaggagaagggtgtcacactcccgcccgactttttcgacaaccctgcttctgctgaaatgccgaccgccgatttgctggatacatcagctacgcaaaaagagcgaagccagcggcagctgtatctatttctctacgtaagcctttgctgtttacccgcttaatatgcccgaagctaacatacagtcagatggaacaattgctgtactccaccggtcaaactgtgcttgactttgtccgttatgccgatcatattcaggcgaaagggaagttatcaaagagtcgactcatcattcctggtggtaagcgcgtgtggaagtgggccaggtcctttttgaatccggaagaccacgaagatgataatatgggtgacattcatacacaaaacaacatcctccagcttggagaggcttataaacttcgtaaagacccggagcatctgccaccgactactagttttcagaagattggggacaaaattcgtgtcattccatggtttctgcgctcgttcgagtcgacctatggcttccgtgtcgcatgtgccaccatgactattgcagtcatcgccttcctacgtgatacccaaaccttctttactgcgcaaagactagtctggggtttgatcatggtcaatctcagcatgtctcccacctcgggacagagcattttcagtttcgtgttgcggattttgggtacattccttgcaatggtagccagtcttttaatctggtatatcccaggtaaaagtatacctggaattatcgttttcctgtttatctttgtctccattgctttctacatccccatcaagatgttccgcttcagggctgtggggatgatcagcatcatcacgacaaccatgatcgttggttacgagcttcaagttcgccgagtcggggaagcggtcgcgacatccaatggacagacctattacccaatatacctcttggcaccttatcggctagctgttgtggcgggcggtatcgctgtcgcattcatttggacgttcttcccatatccaatatccgagcactcagttctccgtcaaagtctaggagcatcgttatatcttctggcgaactactactctatcattcacgagacagtctccggtcgcatgcgtggtgacgagggcgaacgtttactcaagacatctccgggtcgcaaacttgagaaagcacgacacaaagtgttcgcaaaacagatgcttatgctagccggtttacggacatactctggattccttcgatgggaagtcccggtcggtggtcggttcccaaaaaagcagtatgattcgattattctctgtgtagaaaagtatgttatgtgcccccacagcctttctacgtactaatagtccttatctttctagtatcgtgaactacctcagcttgctaggctacgcatctgataccatcatgtatctcggcgacggcgacaatcctacagataccgcctggatgactgattttcgacggctgttcaatgctgctaaagtgacgacccacgaggtcacatctttgctttgccttctttctgctagcattacaaaccgtcaacctctaccgccgtatctcaaagcaccccgtccttatggcttcgcgaaccgcttgaatgaacttaacagtgagcttctaagcctccggcacattgcggagccgggattcgcggcttttgctgttctacaaatttcgacccgttgcattgtcggtgatatggacagattactgcggtaagctttcaatagaaatttctttgttaaaccaggccgggcttgctaacagtgctattcattctaggcttgtcaagggcttagtgggcgaattagacttctctttccatgctgtaagcacaggagagtcattggctgagtcgcgagtgacttctcgggtgggatcaagggtggatttgagcgggtacgcatcatcacaacctgatgatcggcacaaaaacgattgatgtattttttttcctttttcgtctcttcactcttcatgataggcagcttttctgtacatacatatctggacgtggcatgtacataatgagatggcggacatcattatatcattctttatcaacgcagactcgtacaaatcaccgcggttgatttccccctcaacgataccccgcaatatgcttcgccgcagtcggatcaacatcaccacataccccgacttgcaacagacgctcacttttcttttttccttctcaattggggtgcctccatgtaaaaaaaaaaagcaaaatgaccgaagtcaaagtccaccaagctctcttcccccaatctgccggtaaaacagtcctaataaccggtgcagcccgcgggatcggagccgcaaccgcgatcctattcaactctcacggggccaatgtcgttctcgccgacctcccgcagctacgagacagcgccgaagaagtcattcagaaacagatggaattcccaaaccgtgcattattcgtatctaccaatatcatcaactgggcagagctaacagcatgcttcgaaacggcgattaccaccttcggaaagcttgacatcgtcatagccaacgcgggtattatggagtctgaggcggtcctggacatggacaacgtggatgcgaacggacgtcttctcgagagcctggaggcggggagggtaattgatgtcaatctaaaaggaacattgaacagtgaattaccccgccatttgcaaccttcaatcgcaagttgaaacacaattccagctagctcacatgctgacagaatgcctcctcacctaaattagctcttcgcttgggactacactatacaaaatgctccacaccacccacaacaagcccccaaccgacaaagtcaatcttgctagttgcatctacatcgagttatttcggtggtaccggtgtagccgcctacgtcgcgtcgaagcatggcgtgctgggccttctacgggcgtgtcagaatgttgcgcgcgtacacggcgtccgggttaatgctgtcgcaccatttttgacaccaacccatatcacggcgggctttgcgcgcagatgggatgaggctggacttgagaaaaataccccggatcgagttgcagatgctattgcgttcatggctttggatgacaaccgggagggggagtgtgttttggtgagagatatctattgcaaataaggaactggcatcgtgctaaatcgctttcggttcgcttaggttgccggtaagtatctccgagagctcgaggggccaagggcaaagctcttgccttcgtggttgggggtcgatcttatggattttatgggtcaggctatgcagttctttgttagtattgggggatatgtcttgcccaagaagtgctaggggtcactctctcttgcatcgcaaagcaacaaaaatatggtaacggccctgctagacttcagggtggcattatagaggactatccacatcaaggttcatgctgtgtcgatttgctttgctcatttactattgttccatgtactggcactcgaaggtaaatcggaattgcgtgatccccaactcgaagtacctactgtagcattatgccaataatctgactaagaagaccttagaggaataaaagcatgtgactcctcaccatgatctactggaaaacgaagcgagccgagccgatctcgggagaatcccgggcgatctagcggtaaccggtgattacgtactccggagataagggctccaaagctccaaggctctgttaactaaggggattttctgttttccataatttgactcgcgatggtaaccaggggactctggaactttcatgtcgacggtaaggacttcccctgaccctgaatcaaagattattaacatcgttatagggaaatggtatcgttggttccaccctccccgtggacagtcttcatcctcagacacaccgacaacactgaaaaccatccaccgaattctttcgagaaccgacaagttcgaatgaaataccgtcccatttccgtcaccgcttcatttccaactgaattatgtctatactattgatgaggatgcgggtcattttacagtcacccagtgactctatactcgagcgtccgacgtgcagcattggccatggatgatgcaaatgacgaaaccaatgtgcaagatctattgaactcattccaaatcaagcaaagtattcctgcacggctaaacgagctgcaatttcaggtctttacagacttcgtgtttacatggcggttctattttgacgacccttctacctggggaagctcgtttttcatcttcgctgcccttgctattgaattattacgtgtcgcagcatgggacgttggggttaggaatatggataccgaggagttgcccgatcacattttcctcccttccacaatggaaagcgcctgctgagaacatattttggttccacaattatctgatcgtgtgctgcaacaccgatcaaatcggcacctctatggctacaaaagcaaaagattttctatcccgcagtagcaagcacacaacgactgttcgtggtatagccattagcatacggcatatcgcactttttgagatttgcaatggcgatatatctcaatcctcccctattaccctggttaccaatacttcagcactgcgctgctcccctgagtttagggtattggcttatatcttcacctcaaatcgcccgaagggctttttggcagagtgcggagagtgttggagggttacagtacccacggagctttttgacatgatcctcaaggcatccatgccgagggatttggtctcaatggcacaagcgtcctttttggttgagaaatggtattactcttccattccccaaatcggtgccatcagcctacaaaatttccccttctctataccatgttgcggtcaatgagataagtcgggtgcatctggagtctactgctcggtctgctttacctggtcacatatggaatgtgcagagctatcttccaatggtcgttttgacactgataagtatatctgtcctgattgtcaagagaatagatcctgttctgcccttgagacgggtggtgttcaccaaacctaccgcgcaaaacgagtacggaaagcacgcagtgtagttcatggtggcaaaagtacggatttcctgttgcgagtttctaagccatcctgtcgtcggccagagttatggctaatcggaaatcttggcacgcctcctccactaaacgtcgattatacgatattctttagtggagtattttctggtctcgcgtatggatttgatcaatagcacgattcatttacatgttaagggggatagatggcagactgagtacaaaataaaagcttgatcttgcgtggaagttgacgtcgtggccgtgtgggttattagtccacgtgaggttagaatcccgtatcctcaccgtctccgagacgaagtaaccctcttctcgaacctccctcttcttatcttttagataatctcatttggtgtatttattacttttctagaatgctctgtatgcgtgccgcaccggaagcagaagcctgtcaccttcccagttctgatggcgatttcaacaaggtgttatagatgccaaccaccatgacttactgcgcccatgcaatttgtcagcagactatattccagaatggactggatttgaaccactccaagagcctgtgggtaactatctctgtgtgtttgtcctcggctagtcatatatcctttcggcgcggatgatagagctacgcggagaacaacagatgataaggttgtgtacacctagaaccatgcacaatggaatatttgtgaaggagagcacgattacttcgaccttgacatcggaagtaatgatattgccgaagttcagtggtgggctgcaatccttacatgcggacgtggctgggaggaaactcttgctcgaattagtaaacactactatccgccatgggaatgccatttgaacagcagttcatttaaattgcatcattgcgcagaaatgtcatgctcaatttctaccgagccaccgtctgcagcagaagcccaggaatatctttgcaatttcgcccgactctatgatgctttcgtcgacgggttgccattagttcagaaatattccttgccatagctgaacccaattcttatttgttcatgtcatgtatctgcttgactttgcgcgctgcttgactcactcaaacacgtgaatgacggagacaataccaacagtattttggaatcgtaaccatagcaaggtaaataatcatgcgttttaccaaccgtccacatgtaagttccacatttcaggagactcggcaagacgtctcccaaggagacgacccacatagaatcaaagtcctgactagagatttggagaaatatgatttgggtatgtaacatgtacgaaggggagtagaggagtgtccccctgatagcggcccctgcggcgagtagccttcgcgagatgagcgtggaagtagccgtggacatctattcgcgtgagacgttcaaaaaggcctcactaattgcgatcaaattattgggtgcttttcagatttctgtacctatgctttagcagaaacaaaataaagtcaaagccattacctggggtttccctgataatatagcttatccagaatttctacacggtgccatccaacgacacatttatatacggattttacgatacaacctgaatatcaaatgacaaggtaagttctgccaaattctcgttcacgaataaagactccttacgtcatccacggaatgcttctggggtcattgcacctaattatcacgacagccaacaaggggcgaggaggctggaatgcagtatggtcctggcgccctttaacccgtcattcttaagggtcaggctctaatattttccgcgatagaaggtttggataacgaaagatcacatttaggcccaatagcaatggagttactatgtatcccttcttttgtggaatccgcctaaacgtctccattgcaggtttcccgacgacgaaggggcggacagggacctcctattacacaactcttctatcccacgttgatgttggtgaccttataatgcgagctatgaaattttctgcgagaattgctgttcagtttcgattgatgccgcagtcgacctcagaaaccacaatatccaggctcctgcgacgaacgacagtttagcgacaagtacatattcttgcaagaatattttcgacggccaatatcaaatcaaatgggacgccgttcaatagccgaagaaatttacgataatgagtcgaaaatcaacttcggcgtaccggacagtgtccgaagtttggacggtatgacgcaaaacccagcactggggagctcaattcaactgttcgagagcgaaccctcagccgaagaacaacacaggcgatttcaagtgcgagaatggttggtctttatctgtatcgtgatcctggcaatgatggattcgttcaatgcgacaatcttgatcccagctttgcctgtatgtcacatgcaatacacccgtcttatttaacatctataacagagctgatcaaaccctcaattcaggacctcgcaaacaaatttgcaaagccactagcaagcacattctgggtcaacacgatatacctcattttcagcgcaagcagccaactctacttcacaatgatgagcgagatcttcaaccacgggcccatatggatcattgctgtagtcttcgcaacaatcggcacaggaatctgctgcggctcaatgagtctcgcggaactagtagttggccgcatggttcagggtattggcggcggcggcgcaatgagtctgtgtttcattgtaatgaccgatacggcgcctgaatccatgcactcgcggtattcatgttatattctgctaacgcgaatgtgtggcggcattctcggtcccgttatcggcggcttgtttgtcgattatgcagactggcggtgggcattttatttcaactttattttctgcgcgctgggtttgctggctattccgtttgctgtggaccttcgcgcattgagatatatcccgatgcgtaaattgcgcgttttggattggacgggtgctactttggcccttttaggtcttggggctctcctggttggcctttcttgcggtgggacctcctatcgctggaaagactggcagacgattgtacctcttgcggtgggtgctgtggttcttctcgtgcttctgctttatgagtccaagtgggctctgtatccgcagttcgggaagagagtgtttcggtcgaggatgatgactatgacacatctagggtgccttttgcatggttttgtggttagtagacgttttccttgcattcgtttcgtgttctctgacggcagtccaggtttttgctcacttgcaattcttcccattatacttcatttccactcattatatgtctgccactttgtcaggcatcaccttgctagccatggtggggcttgcaattgcgccggcctcggtggttggtgtcatccttgcgagagagttaagatgcacccagtggatcatctccggtggttgggtcttgacttcccttgcgagtggatgctctatccttttagatagctccacgccgaccgtagcgtggatatttttgctattcacagcaggccttgggcatggtttgttgctttcgagttacaatgttcgcatccagaatctacctaaagacaaggatgattctctgccaactctaccaacaaccatgtcatactacatgcgatcctggggtatggcagttgcggtccctattgggggagttgtgttattaaaccgcttcgccaatggatttggcagtgttgagatgaatcgcgacatagtaaactctgccaacggatatctcattctgatgaaggatgtgagcatgacaagtagacagagagaggcggttacaattgtttcggtcgctgcgtttcaagcggtatggggtctcatcacgggtgtggctatcttcgggggaatttcatctggtttcctgtggcgaaaaaactgaatgtgaatatatagtatgtgtcagaattagaagacattggatttgtcgcaacacggacatattggagtagcacaaaaagctgacctgacagagtataaggaaggatatacaatgaaagggcaaaaatcaacgtaacatttgagctctggtaagaatgactcggatttcaggctaaaggctaatttgacataagaatgaaacaccatttctcagctagcggaaggacaatcaggctggcatgggttgctccgtgatcttcacactttctcgataactttcacccagttggcttttatacttccggaatgacgaactctcgcttccctttgattttccagccagaaagcctgtctttaccaagcatctctagtgttttcttctcgaccatactgtatttggagggatcgttccggtcaaactcgaacggctgcttcaaggctactggtgggttggtgataacgcgtggatgtctcaagctgttgacagaaatcgagtgacacatgaaaggatggagaagaatcacatcgcccactttaccagtcatctggcagaaatttgtgcaattcctaacgatatccgagtaaaagggcgtatctgcggggtttccaataggctcttggccacggggatacatatacggtgtcacgccctcaggatgcttgtactagaaacttgagtcagaaatatccaaaagtggaacaggaggcttagttacataccaaatgctcagcaacatatttcatcgcctcaggggcgaccatagtgccacctgcacgatcctggatatctgtaaatagtggtgtaatgagcagggcctgttcaggcgaatcaagaaaatgcgtaaagaagtcgccatcgacatgccatcccggtagatcagcaggatggggccatgtaccctcggattcgggcaatccaagattgacgatcaaggcatcgtcccaagtggctgattccggggctacacggtcttcgccgccgagaagctcgcagatggccgcccatgccttgggagcgaaggtcctgactggctcttctttggtgcctcccatgtggataatttcggttgtccaagtcgacttatctgttggtgacataccgagtctagtccacacatcacctgcccattcggttgctttctctcgcgagaaacagtctggtagacgcacgtacccaaatctcatgaagtgatcgatctgctcttgggagagcttgtatttgggtttagctgccattgtgtctgggtcctccaaagtagagctacagcatgagcccataatttaagaacgagggacatgatttcgtgcaaaagtggcagtttggccgttacctacttgaggaaggtgcttgctgttatgtgattggctccattattctgccgatcgctcggaccggaccagtgataatccgtcccttcctgccatgactcggctgaagaaggaagcggtgaactcgggttctcctatcatttgatatttgtattcctcttcttcaatggcgtctgcttgcagatgaacaatattcattgtgccattattcgcgtaataaatggccttgccaagatacgaattccggctaaacagtcaaatctagttagtgcatgaccccgcaaataaagaatgctcccgggttgcttggcatcaccactcacaccacctcatttcattttctttcaggtggcgtccaggctaatattgttgctcaattcgacacggagcgtgtcagtcggatcctgaacgtgtttggcatacagagatccccaacacgaatcacccggaacctggaacaggaacagactaaaagataacacctgacccaacttatacctcgaatgaacacggagggatatcaattatgtgcgctgccttccccggatttatcaatttgtgggcctcggcccgtcttacctacgattgtggggccgaacggcatttgtctcgtctctaaaggacggaccatgaacacgcgctacatacccaagtacctaaataagcgaggcagttgagatcatgcgactaggctgctatagccaatccaactgtaccgaatttttaaagccgtggaattagcctgggcgtaagagatggaacgttttcgctctactagcatccccattacggcaaggtccgtctgccatacctccaatctggttaggctgtgcatggatatacgttcctaaccccagcgctacacggaacccattctagtgtcttgggaacgcttgagtttctttatttttatctttcccaatatgtgttttgatcgcgaaaactagggagagctgtcgatccaagcaactcagccaagacatcaatccccagtagccggttaatatcacagtttattatccccaatggcaaatatgaatagcttaaaaactccagcggaacccccctatctccacatttctctgccttgttctatcacaagttcggtggacatatcacctttttacccatatatttcagataccgcattcttctaggtagactctacagacatcatgggtattgctgtcggagcttcgactctgcagtccgatttggacgcgactcaagctgcaaagcctgagttagagaaggttaactggtggcaagagcctggtctccgaaagctttattgctgggctgctgtgctttgcatcgcttctgctaccactggatacgatgggtaagcatcacagctctgtggttggatatctatagagctgacggggccttctgtagaatgatgcttaacacctctcagaatttggatacatggcaagtgtacttcgacgaacccagtggcgccacgctgggattgatgaatgcaatttaccagattggtagtcttgccagtttcccttttgtgtaagtttccttgcactgaataaaatgcaagctcgctgacttgaattaggccattcatcgctgatcgatggggccgcaaaattccaattgtgatcggatgtgtcttgatgattcttggtggcttgcttggtgcattctgcacagactatggaagtaagcttggtcattttatatccgcccgtggtcaggtcgttatatttactgatcctatttagtgtacgtcgccggtcgactgctcctcgggttcggaaacagtctggcccaaatggcatctccggtgctcctcactgaaatctgccacccccaacatcgtggaaaggtcaccactatctataactgcttgtggaacttgggagcactaggtatggatccttctagtcagcctccggacactagcgtgctaattgggtctagttgtcgcatggcttgcatggggaacgatgtatattccgaatgattggtcatggcgcagtttgactctgctgcaaatcttcccggctgtcattcaaatcgtcttcatctggtgtatgcttcattttactccttatcctggatttaatccagtggctgaccattattaggggttccggaatctccccgttggctcgtatctaaagaacggtacgaggaagcattggacacactcgcatattaccatgcgaatggagataagaacaacgccactgttcaattcgaataccgcgagattaaggagactatcagcttggagatgcagttcgagaagaacagcagctatttggacttcatgaagaccaggggtaaccgttaccgtttggcacttctaatttctctgggaatcatttcccaatacagtggcaatgccttgttcagcaactacaccaatttgatctacaacagcatgggcatcaccgaacaaacgaagaagattcccgttcgtgaccccttgccctttttttaaatgactgctagcttacgttttattcatagctcaacggtggacaaaccataatcagtctaattgttagcgtttcaagcgcattcttcgttgaccgagtcggccgacgacctcttttcctgatttccacagttggtacgtagcagtacgctccacgataaatttcaaaggctgacttatcaactctctcctctcaggcatggtcctcatgttcctcgcatggactgtcgtttcctccgtcttcgaaagaacccaggatgtcaaaacaactggctacccacaagtcgtcttcgtctggctcttctctatattctattccattgcctggtcgggtctgctcgtcgcatatgcgcttgagatcttgccgtaccggctgcgcgctaagggtgttatgattatgaacctgacggtacaggcatctctggttctcggaaagtaagttgcctgaatatatgtacccgctctttggacgaaactcaccatcttagttacactaacccaattgcgtgggagaatcttcctcagcactggaacttgtcgctgatctacacggtctggatattcatcgagctctgctttgtctacttcttctacgttgagacccggggccccactctcgaggagctggccaagatctttgatggtgatgatgcccaggtggcgcatgttgatcttcaacaggtcgagaaggaaattcagattactgagaaagagtcgcaagagtatagggaacgtgcgtaattgtgtcgttgcggagatatattcgtgcggcatttcagtgccgattgtcgtcagataataatatatttgcttgctactcatgaatcaatttgaaatattcaggtatatttaggcacaacttaagttgaacatcaatatttaataattaatataggatctacaatactgccccgcaaaatcaacaaatgagagagtgtcccgggtggcatactgcctcattcgaaaatcttcccgaccaccttatccaccaagccctgctcgcgcgggatgagtgcagcctcgtattggtcgatctcctcctttatcccgccgaggctcaggtccgcggtgcccggccacacgtagcggctgcggaagacgatcttccagaagaggaatagcacaatgaagaagccgatcatggcgtagtcaaggcagaaccacatgacgtcccaaccgcccttgatgaaaacgtcgtagccgccggccagcagcatgaagagcgtgccgcccatggcgaagtaggacgtgtacggctggaagcggcccttgtagggcagggtgtcgcgggagataccctggcgcttgagagacgagaagaagtgcctgtaggttgcggccgtgcagaggtagttgataagttggcagcaggtgacgaggtcgacgaggtagttcatgacattggccgacgagctgctgacctgcaggaaggcgagcaggcagaagctgagcgagaagagcagggcccagagtgggacaccggccttggtacaccacgagaaaaagcgcggggcgtggccttcgagagacatgccgtgcagggtgcgggttgccgagaagaggaggccgtttccagcgctgaagatggacgtcatgataagcgcgttgacgagggagggcagtccgttgatcttgagccgctgcattgcgatgacgtagggcctgtgcaaaaaacattgttaggataagtgattatggggaatgaacaaacgctgttgagaagacttacgatgcagcgccagtacctgatccagtgagtgaaccaccgagaatacccatgagggtggtatcgttgtacgggatgacgatacccatacaaagggcagatcccacgaagaagagaagaatgcgccagacgaaggaccggtaggcagggggcaggatcttgcgggggttctcagtctcagcagccaccatagagatgtactctggaccgcagattctgtttttgaaaacggtcaggtcccaacgcacaaagtcatactaagaggagttgggggcgcggctgtaggtggcaacacttacgaaaagctggcttgatacacgcaggataggacgcccaggaatttgcccgtccctccggacacgatgtgttcgacaaaggcgcccgggtgattccaataccggaagccgtagcggtcatgcagggggttgccgcccagcatagtgatgaaggtgaagaagaacagccccaacatcagaatcaccttgaagatggacaggtagaactcggagatgccgaagtagcgcacggtggccacgttgaggatagcatataaaacgatcatggcgacaattatggcctcaacggggactttgtcagtccagaaggtgatcataatgttcatggctacaatttcgaagggcactaagaaggccatgttgaggaagaagttccaggccatggcgaagccgagagcgccatcaacccattcgctgccaaagcggatgaagggcgagggcacgggtaggtaagtcaccatctcggcgaagcactcgttgacggcccacatgacggcgccccagatgaagaaggcgatgaagagacctgcggggccacccttggggagagcctggcccatttgcacatagagagcttcaaggttgtcagccttccgtgctaccgttgtgaagcagaagttcttgtcgacttacaggtaccaatggctcctccaatagcgaaaagctggacttccgatcctcgcagcttgcggtgcagatgctgcgaccctgaggatatgttcgcagacatgcccggctgaacatcatcgtcgatcttggacgaaggctccgtggcgatggatggtgaaggagggcccttctcaaaatacttggaggctgacatgttgacgtggtgtattcaatggctcgtcgatgttgagctttggtcgtggaattgaatctcacagcatgccaaagggaccgtctgggctaaggaggaaacacccggctaaatgaaggatccaggtcgggcaatacgcaccggaagctggggtcgaacaatgacactcagagccgggggtggctaacatcgtggcccgctacatctctcattgtaatgtgagataagagattggtaggattacctgtgggaaatctgccctcgggagcctatttagatagcggcccctccttcgcgagctccgagtgggctgcaaatctaattgattgctcttttagaactagaatcagcactaagataactaaattgactggctttgaagactatctcgttgattataggtggcgatttgcgtagtcactctaacagctatcgagatacgcttgggccgaggggtgatcgttagcatatcggcatgtgtggcgggggaatttgtggggcaacgtgacctctgtcggacgctagtccgcccctgtggctggatggcttatcggttatcgcagcactagccatgacagggccacgagggcgtatcagtggtcggggcatccgacgcgtatcaccaccacggtactttttgcctgaccgttgcacatcggacaaaagactgtgcctctgtaaaagatgtaagggcgaggagatatctcagtacatactaccgggtagagacggagcaggtgtgcaagcaagtgcaattaggtgctaatagtatattgtgatcatattattgtgtaaggtgtatcttccaaaagcagagaagtttgagagtgagataattcaactactaatcccgaggccctcgtgatacggaaattggcctgtgcagctgttagtgccgcgctagtcccccactaagtgcccgactcagggttgcatggccatccagcaaactactcatgtatttgctatgagtgcctgtaattgttccctaattcttgttgtggcatgtgctcactgtttgaagctgctgttggatagtgcctcctcgtattggtagtgcggctggaactctacatacaacgtgtcctgtgtgccacgttagcccagggctgtcatcggtcaaaaaaggagtcagtagactacataccggagtgctggccatcttgaagttataagctgcctcatcgtcgctcacgatgtgcttcttgtgtccggcgctgtcagccagcagctgcaccttgcagctcctctccatcaagcagaagaggaacgccgcctcgtccaccgtgtagcccgtcgtcagtaggccgtggttcattaggatcgccgcctttccggtctcgcctaggctctccgcgatcttttggccctccgacgcctcgttggcaatgccgccgtagtctgagtacaccgagtgcgcgttgtagaagtagcacacgtcctggttgatcatctcaagcggccgcgcaaacgccgagtaggcccggccgtgcaccgagtgtgtgtggcagatggcatgcacgtcgggccgcacgcgatgcacagcgctgtggatctggaacccggccgcgttgatggacccggctgtgttgccagcgacgacctcgccgtgaatgtcgacgcagatcatatcgctagccttcagcaggccaaagtgcacaccgagcgggttgatccagaagcggtcggtccactctgggtcgcgcacgctgatgtggcccgagataccctcggcgtagccctcgcgagcaaagacccggaaggctgccgccatgtgttcgagctgccactgccgcgtctcagcgtgcgtgctaaactttgggatgccggggaggcttttgcctctgtgagccatagaggccatggcgtcgacatcgccgtccattgacttggtaggcagggtggacgaggaatccacgagggctactgttgcggatggtgccattgtgattcagttgtaaaaaataaagtgttgcagagcgatgtattgcaatgtgaacggtcaaccttggaatgataacctgagtagtaagacgtcgggggcgatgtcacacaaatacatacacctaaccttgatcgcaatcacaagcgctctatctccatgataaccccatactattcctatccacactccgcagagccaaaaacaagaggatactagcggcttgcgataagccggcgttgacaagccgacacatgtagattgtcttcgtaatctcaccccgcttggggcgaagactgtatctgtgtcaacccagccattgtcggcctcgccgacagtgcagagctggcacctcaaatcttccccaccaacccgagggaaggcattagagggcatgtacaaaagaaataaacatcacaggacatcgcccagccttggagaaaagttcaacttgtgttctattatactttgccgccttctagctcactcagaggaacgcccatcatggatacgaaggtccaagaggttctcagtccactgagctatcgcttgatccagcttgtggggcatcataatacactgcctgtgctagttgctctgggcgtagtgctagtttcctatgtcatatacaatgtaagacaaaccatgggaaccgagtgtgacatgatgactgacatacaataggtcgcctttgcaaccgacatcccttatatcaaggggctgccggagatcccaggcgcggttcccgtctttggtcatttgttaaagctcggcgaggaccacgccaccgtgtgcgagaaatggtggcgccagtacaaccagcccgttttccagatcaagctgggtaacacccgggccgtggtggtcaattcctttgacgactgcaagaagatgctcctgggcaaccagaacgccgtcatcgaccggcccaagctgtacaccttccacggcgtcatcagcagtacccagggcttcaccatcggctcatccccctgggacgagtcctgcaagaagaagcgcaaggcggccggcacggcgctcggccggccagcgctgcgcaactactttcccatgttcgaccttgagagcttctgcatcgtgcgtgatatgaagggcgacagccgcaacggcgagctcgaggttgacgtgcgaccttacatccagcgttacgcgctcaacaccaccctaacgctctgctacggcatccgcatggacgaggtctacgacgagctgctgcgcgagatcctgcacgtcggctccgccatctcgctgctgcgcagcgcgtccgagaacctgcaggactacgtgcccttcctgcgctacctacctaacaacgaaaagaacgcgcgctcccaggagctgcgtgaccgccgcgacgcctacctaaacttgcttctggacaaggtccgcgacatgatcaagcgtggcgtcgacaagccctgcatctcggcggccatcctcaaggacatggagagcaagctcactggcgtcgaagtctcgtccatctgcctgtcgctcgtatcgggcggtttcgagaccatcccaggtaccctgacgtcgtgcatcggctctctgtgcacggccgagggccagatttggcaggaccgtgcgtacgaggacatcaagcgccacttcccggatatacgcgacgcctggacagcctccttcgttgaggagaagataccttacatcaacgccatagtcaaggaagccggccggtactacaccgtcagctccatgagtctgccgaggaagacagtcaccgaggtcaactggaacggggccatcatcccgcccaagacgatgatcttgattaacgcgcaagccggcaaccacggtaagtgatcaatcacatgacctttttatgaagaaacacgacgctgacatagtactacctgcagatgtcgaccattacggccccgatgcgggacgcttcgatccagagagatggctcaagagcattgacccgccggccgaggctgaggtcaatgggctcggccacctcagcttcggaacgggctcccgggcctgctcgggacagtatatcgcatccaggcttgtgtacaccgcgctagtccggatcttgtcgtcgtacaagattgtggcgagcgagacgcacccgcccaacacggactacgtggattacaaccagttcaagacagccctggtggctatccctagggagttcaaggtccggctcatcccgagagactcgaacatgacgagcgaatgcttggatgcagccgagcagaggacgaaggagcactacaaggagtagatagacagttcagcatcgtcgttgaaatgtacgtgacacgcagttgatgtagacacaaaaatgaaataatttgaacagtatgaaaagcctcatttccagtcatgtatgatccgtgacgcctgattgattggttggcatgtaggccttttattgctggatcatgtgatccaggtgccttgttactcgatggcctcaaacactcaaaccccatactttgtctatttcatgtgttctaaatctaaaaattcctgacgttttcctctacttctccaattgtacgataattaggaaatactgtacaagtgcaacctcgtctcagagctcgcattattcaacccgtatccagccgtgacaatcatcacaaatcgagaccatgcttcaagaagcccgcgccgcatactgtacacagggcatcaatgctacatcttccgagaccccacctatctaaaacgctcaaatggagtggcagctagagtcccaacgggtcggacagtccgacacgtaggtgcgggcatgtggtcattgccccactgcagcacgccggcttgataaacacatacaatacgaatatacttaggattcgccgagtatcatcaaggtcgggttcactatacacatcatgtcttcacttagcattgagcagcttttcggtgtcaggggctacgtcgcagccgtcacaggagggagcagcggtctgggcttcatgatatgcaaagtaactacgccgaactccgcgaaatgttgcatatatcgataccttggaacactttctgacctaggtggttgtggcaggggcttgtgacaaacggcgcaaaggtctacgttatcgccttgccaacggagcccattgacgagaaggtggcggagctaaatgaaatcggccagtcgacgggtggaagcgcacacgggtatgtttacccaagccgtgtccgctatgtcgactaataacatgtgtacacgggccagattaccctgcaatgtcacggacaaggatgccattgctcgcgtcgctgcctacataagcgagcgagagagccatctggacattctcatctccaacgccggcataaggagagatcctcctgtggcctgcgacgtccttaccgcctctctatccgagctgcagacgtccatgtggtcgtcgcgccactcggactgggctgacacattctgcgtcaacacgacggcacactacttcctctcggtcgcgttgctgcctcttctagcggcggcctcgcagctcgacctaggaggcggccgcaagggcaaggatgacggccgcggcgtcatcgtcatcacgagctcctgcgctagcatgcacaacgctaccaatgtggacttgaccagctacgcgacgagcaaagcggccaccgaccacctggtcaggctgctggctgccaaattcagccgtttttacgtgcgcgtgtcgggcatcaacccaggctgtgagtgcttcgactcttattggattggaaagcagcattgtgcatccatcagacttcatgggtacggtaatggctaattcttcatccttgtagttgtccctagcaacatgaatcccgtaggggaagaagggaacatgttcagctccctgtttgacaaagtacccgccaaaagggcgggtaacgaggatgatattgctggcgcagttctctatctggtcagccgggccggcgtacgttcttcttattctctaaccacaacccttgaaccccgcactaacagctacaggcttatgtcgatggggtgtccctttgtgttgacggtggtcgtattcttcttgctaatggccaagagtaaattacatacatctacaagtactataattaagttgagctgcaacaatactatcttcctttgcagatatatatcgtctccatgcagacattcccgacttccccatattccacaacgcttctctgtccagacaacttcttgctttgctcctgtctaggagctaagaagtggatgccatataagcggtcttaatctgcggggcgcttcggtgttctgtgtcggcattgccgacgtgattgcactaataatacagcgcatccactagtctaatctaactggtagataatcgaatcgctccagtacaattatctgtgtacgtaacttgatatcgtacccaacaaaacaccccatgagtaagggcctacctacgatatatgctaactatgttcactgacaagttaaacaagtgactacttgctgcttgtgcttttgggccatatagaacctgactgcctaaaaaacggtacataagataaatcaactgctgcgattagttccaccaagcctatttgatataaaaatagccgtgccggtggtctttggagtcaagagaaatcagaaagaatagtcaaagatgtcgattgtctcattgtccgatggctcaaggtgaggaattctatttttcaagggtaggcagctgctgataagcctacgatttcagctcaagctttacagcagaggatttgaaagacgttgcagcgcagctcaactttgaattacccaatggcaaggattccgatgattatttgcgtcttctctggtccttcgaggccgtcatgaagcaggtggaagatggatccgactacattcatccggcgctcaagccccaggccctctctacgagccgcagctattggaagccgaaaccagaggacaacccgttcaatgcctggagtcaccggtgcgacctccgcgccgcaaatcccaccagtgatatcctcaaaggccgcacggtagcaatcaaggacaacatatcggtagcagcgctgcccacgacgctcggggcgcccgcatcgcttgtatctggagacgccgtgtttcccatctcgccgatcgacgcccctgttgtatctcgactgctagctgccggtgccgtgatcaagggcacgtctacgtgcgagtgcttctgcgcatcccccctatcattcacatcagccacggggccggtgcacaacccccgcctccacggctatacagcaggcggcagcagcagcgggagctgtgccctagtcgccgcccactcgctggctctggagcaggatgacggcagttgcagctcatggggcgagacggttgagctggccatcggcaccgaccaggctggctcggtgcgcaccccggccgcgttcaacggcctctacgggctcaagcccaccttcggcctggtcccttacaccggcggagggtctatgtcgcccatgatcgatcacctgggaccgatcgcatcccggctggaggatgtcgccgcgctgctcgaggtcatggcaggatacgatggcctcgatcctcggatgacgcccgagtcccctctgatggatcaggtgaaaccgtaccgtcagctcctgtcagatttccgacagcaggtcctggccaggcccagcgatgtaggtcagggctggaagatcgggcttctcacggagtcgttcctcgtcccaggtgtgtcctccgaagttcgtgacaccgttcgcgatgcgacaagaagattcttcgaggcggctggagcgaccgtcgtggagatctccgttcccttgcacagcgaaggtccggtcatctggaccgcatcgacaaggccaaccatgtccagctggctctgccagggaagaccttctggccatctcacctacctgccaccccacctaaaggctaggtggcccccctcgcaggagatgtacgaggtcctcaactcggccaatccggcactaaccaacatcatactaagcgagcgctttgcccagcgcttcctgccggcgggggacgaggcaaaggcccaccgcaaggtctttgagctgcgcgacgcgtacgatagggcgcttgaggagttggatgtgctcatcgcaccgtgcgcgccgactgttgcgatgccccaccccgagaccgtggataaggagggcaggacgccctcggttatagagaggcttgcgccggccattggtttgacgagcaatacctgcccgttcaatgtgaccggccacccttccctgactgtgccttgcggtttttccagccggcccgagcggccggatgtccgtcttcctatcggcatgcagatcattggaaagcggtggaaggatgaggaggttatcaaggcggctgctttatttgaaaggggacgggagttgatatccagctagcttcttttcacatgtttaaatgaagacttgcgaaacaattatattccagcccacatgggatgtaaactagggatgtaaactaatgggcaagtgatctatttctcttgatttgaattttgatccctagatcgactaatccacatctacgttgtcaagaactcggtgatagctcggtccaaccactccgtatcggccttgttgacaccagcccctgctaggtggccccagacagacggaatgaccttcagcgttgcagccgtgatagagccggcttccctctcgctagcctcccagcggaaatactggtcagtccggcatggcatcagcagcacgcgcgctctgattcgcgagagtgcgctctccagcgacctctcgtcatccttgctgtcgccctcactatctaccaagctgctgacgtcgccgctctgccacatgtgcagcatggcaagcaggtcgtcggggttccacccggcatagttcactcccgtcacgtcgcggtcccagtcacccagggccgcgtacccgagcgatctgtatgcctgctgttcgaaccactcggcgctcgtcagccaggcggagtaggccttgccgaaggcatggacaccccgggagatgcccgtcgccggtgatgtgacgcggtccttgtcaacgtagtcaacggcgttctgtagcgccgccttcggcccttcgaggaactggtagttgtgccggctggtccgtgccgaggagcagatgacgacggcgctctggacgaggtctgggtacatcagggtccagtggtaggcgcactggccacccatggagaagccgacaacaacgtcgagcgactgaaccttgaggtggacggtgagaagctcatgctgggcgcggacacagtcgcggtagttgatagagctcgggaaccccggggtattggaggggctcgacgattcaccgtttccgaagagcgctacgacgatgatcctgtgatctcggagcgcgccgtcggcaaagatcgaggtggactttagccggccgcggaaacaggtgatgaccagggcagttttcgacacatctgagtttaggtcgagataggccaggcgggccaaaggtagagtcgtcccatcctggaaggagaagttggggatctcatagagctgggtcgttgtgccggccatctttgtgtgccttgagtgcagtaacttcttatacagcgtctaggtctcggcgcagctgttgttcagagtgaggtgaccacttggtatatttggctagttctagacggcggcattggcagtccattgtctcagctcgcactgctgcactcacccagtgtcaggcatcaagtggaggcttcggaacttggcctgatgatcacgtgtcggacatcccgacgcatctgtaaagtcggatcggccgtcccgacatcgcgatggggcatcactgtgaggcgggatgagcgatgatagattaccccgggccgttgagggtgcccttggcccagaattcgggtatttagagtagagttgagagggacgaggtcatgtactgcaactattatacccaaacaagtcaatctttcgtttctttccgtatctctcaaacacaaacttacatcgttaatcctcggtctgacgacttacgccacaatgtctcccaacggccaagctttcctcagcaatcccgacctgcccgagggtccgacgcggttcccccaagcccgcatcgcgccaccgacctcgacgcacaagaccatctacatctcaggaacggcgtgcgtccgacccgacggcacctgggagggcgtcaccgagaacgccgacggcacgcgcaccctggacattcgcaagcagacggctgcggtgctcgccaacgtcgacgccatcatcaagggcgcctcgggcggcaagggaggcatccacaacgtcatcgacgccgtggtctacatcctggacatggagtcacagtatgcggggatgaacgaggagtggaacaaggtctttgccgatcgtgctagcgcgcctgcgcgggccaccatcggggtcagggagcttcctgatacgcggatgatcgtcgaggtcaaggcagttgccgtggttgagttctagtgtggggatttgcagcgtagcttagacaaaggcagcgggagggaatcacgtgggaaacttggagatgctcggccatgactcggcctgggtgtctggtcatcgcttatcgcggggaaactggatgtggggtgcagctgggctccgggtggatcttttatgaatgtatggtaactgagacttgctgacaaatggtaatatacacatttgtgcggtatccaccttaccgtggccacatggtcttctagatgacgtatttaaccgtgtatccatggatgtattcaatcttgatattcaacataaaactccctaaccttaaagtgacctaggtacggagtagttggttatccaatcactttggttggtcatccaatcactcgagtcaagatacggtacgtatgtactgtaagatatacggagccaaatgataagcaactccaatcttggatcgacaacctacaggctacgcgtattgcgcctacctaatgtaaccataggctatacccgttttgttcaagggtaatgtcgtcgcatcagacagctacggcggaagcaaggacgtcatgctcccggtgtcataagaggaagaagcggtgcgatagggcgttgccatcatgcaggaactgccgggtcgcccatgtgaggtgcagctttctcgacgacgactgccagagtgcatcataccctgtagcgtatgtccgcagcctggagaaaaagctgcaggacatggaaaagaagatggcccagatgtcatccccgcttacagacgggggacccttgtctttcggcggcgatgatcagcaggcttatacagagtcaagtatgggcggcaatacggtggtaatggatcacgactctggcatgcctcagcaggagtccgacactgcgaccagcatgcccggcaacctggccgacttgcttttcccagaaccgcctgcgccaccccctccaccgtgcttcgtcgacgagcttaagacgctctcacttgaagccacggcggagcggcacctcggctcaacatcgggcatctccttcgcaagactcacacaggtcgtgctccgccgactgacaccggataaggccgacttcaccttcgttagcgaccgcggcgcgaactacgccggggcgccgctattcgacttcaactccccctcagacctcttggacccctccctgtttgagggtctgaatgagtctgtctctacccacccgctactatttggtgatgttgttgttgcagacatcacggggttgtccaacgatgtcggcgtggctctggatctgccgagtgaccagtcacacatcgatcaactagtggacttctactttgctcattcccatactctatatccaatcttacacaggggtgagttcctgcagagcctacagcacctccgtgataacccgcacgatgcggcggcgtgctcgcccttgaccttattccgcatctggatggtgctcgccgttgggtccacagcgtactgttccgtttcactgtcagaagagtctgaatctagggtatattacaccaaggcacttcaatatttcgagcaagccatagcctatggcgagatggtgcgtaacccttcaaaccgaatcatctgcttggcagctgtaactcactgactgtggtctctctaggctgcgctggaggccatcatgttgcaggtctcgtactcgttcttcaaccagctaggtccaagtcagtagcatcgggccggacatcggttgaacacgtcctaacataaagctgcagatacctggtatcttgtcggcatggcggctcgactcgctgtaggcatggggttgcattcatcctcaatctatgccggaatgcccgtcgacatggagcagagacgcaagcgcatcttcttctccatctacatgatggatcggtaagtacaacataccgttctatcttacagtatccactgactagctcattagtgtcgtatcaaatgcgctgggccgaccctttgctcttcacgatgatgatatcaacatcacggtgcgacagccccttagcggagcatcctccaaaggcaacacatgctgactactaacggtaaccaaagccctttgtcagtgtagacgacgagaatatcacacccgacggtattcgcccgccgagctccctcgagccatcgctcatggccattccgcttcacatcctcgccctccgcaggatcgccggcaaaatcacccggcaggtctactccaaccgccaggccgcgtccctgaacacggagcagcgcgaggccatcctacactcgctgcacaaggagctcatcgactggcgacgcgacatgccgttcccgctgcccgacgtcaacgaccaggtgccgcacctgtgcaccagctggttcgacttcaactactactatcacctggccatgctctaccgcccctcgccgctgctgcccaccatggaccgcgagcgcgttaagacgctcgctgaggcggcgtccatgtccatccgccaagccttcaacttgcaccgccagcaccggctcgcctacaactggctcaaccttctggccctcttcaccgcaacgttgtcgcgcatctactcgactacggtgcttccggagaacctcgtcaccatcctcaaggagacgagggcgatcgaggacctggacctcgccattgccttgttcgacacgctaggcgtcaagttcccggccgcgaacaaaattagaggcatgattgctgagatttctagacggtataaggacttgcgtgattccggttgaccagtcaacgaactattcgctcctggataaaactttgtgctatatccagccccttttggcatggccttaagcgagccggaaagccagccgtgatagcatacaccacgattttacatctaccgaccgcaccacattgaggaggagaagctgaagagtttttgcaattacttatttcgtttctatctgttagttctatagcgtatatccagcatcaatgattatgtttgccccagtcatactcttcgacgtcgccagactaagaacctgggcggccacatcctaatggtggtgccaataagttaacacaccgttgaagtgacagaaaggttggggttcaaacaacttacctcgactgcgacaaacctcttcagcttggttttttccctgtgggcttccttctgctcttcgctaaaccgctctgcccattcctggtgattaaaagattagccctcattcctatcactcatggtagatagacggggaaatcctcaccgtttgaagcagcccaggcgacacgctattcacccggatcttgggcgccaccatggtggcgaggcccctgaccatgtgtagctgtgcagccttcgtagccgaataagcctgaacgacaagacgttgttagtttctcgataacttacgcaatcctcgacgtggtattccaataccaagctacccggggtcaaggaaacgtaccaacgagctccccataccctgcaggcccgtaatagaagacgtcgtgacgaacgccccctccgtctcgtcgaggtgcggtcgcgccgcctgcagcagccagaggtgcgacttgacgttcatagcgaaggcacggtcccagtccgcttcgacggcgttgtcgtccagcgacgtcgtgtcgctaaagcgagtccagccgccgttagagaagacgacgtccaggcggcccatctgcgcgtaggcctcacgcacaaggcgctcgacgtcgtcccgcgagcccaggttggcctggatcgtgacgtggccatcgccaccaagctcggcgcacagggcttcggcacgctgcgcgttcgcgttgtagttaatcacgacgcggtacccgtgttttgcgaagagacggacggtcgcggcacccaggcctgcgctaccggctgtgatgaggactacgggagtcggtgaagatgccattgcttcgacagtgcacacggggtagatggagtcgtgttgactttgaggtctctcctatggccgatgcaccgaatacttccctgcaaatgcactgctaatatctgtcgtcgtcgggcgggcgtaaacacgaaccaggacacaatgtatcctgctcagtcagccctatccatgatgtcggactgtccgacatcagcagattaggcttctccatagcctgtccaacgtacattagcgccagcgggggcctgataagcacgaaggctatcgatatcgctatcgggccccccgctacgtaccgccaaaggaagcgggggacaaatgctgattttatgggtcgtcttagtggttgtggttagaccaaaaagagcgtcagtatgcggtgcttatcagagctgttatctagtaaggtacaagtggtggactacgtatgatactcctcccaagtcatgagtttggatcagaaagcacatagaggttgaaacctttattattataatttcggctcgttacttaacgacttgccgccattaaaattacaaatagacaattccgcggggttagtgtgagtgagaagctgttccagatggcatccttgtcggtcatcgccgtcgtgttggcgccggtcctcttcctcatcaaatatctactcctcgatcccctatttctgagtcccctgagtcgcgtacccgggcccaaggcgttcgctttgacaaaatggcgtctggcatacgaggactggaagggcgcgcgcacccgtaccatccaccacctgcaccagaaatacggccccgtcgtccgcatcggcccggacgaggtctcgttcaacagcctggcggcgctgcggaccatctacgggcccggtagcaagtacggccgaacgggcttctaccgcatgtttgacgtctacggccgccagaacctattcaccttccactcggcggtggagcacggccagaggaagaagctcctatcacacgcctactccaaatccactatgctcaaggagccctctactggcatggtcgaggagaaggcgcggaagtacatggctctcatcgacgcggagcccgggcacgtgagcgagatcttcagcacactacactactactccctcgataacatcaccgagttcctgtacggcaggtacgggtccacgtctgccctggaaggctcagagccgcaccgggctctgattggcgacatcttagatccgtctcggcgcaagctttcgtggttcaccgtgcacttgaatacagtgacgaagtggctttattcgcgcaccaacacaatggagactgttgtccagccgcttctgcccatgcagaaacccgccacatacaccggcattcgagagtttgcgctgcaggcgtataggagcttccggtcggatatggaaatgtccgagaaggagggtcggccctcggaggaagccgagggctcgtctatcctcgagcgcctctgggcgtaccatcagacccacaagacagacggtctggatgacttggagattgcctcagagtgcgcagaccacttcctagccggcatcgacacgaccagcgacacgctcatgttcctgatatggtccctttctcagcctagaaacaaggcctttcaggagaagctgagacgggaagtcctcggactgtccagggagtcactcaacggccacggccttcccactgccgaggcgagcgacaagtgcatctacctgaacgccgtcatcaaggagacgctaaggctctatgcccccttgccgacttttgagccgagatcgagcgtcgccgataccgtcatcgacgggtacaatatcccggcaaatgttaccgtgggcatgtctccattcaccctccaccgcaaccccgaagttttcaaggatcctcgaactttcaaccccgatcgctggctggggccgcaggcggccgagatgaaccgctggttctgggccttttcgagtggcggcaggatgtgcatcggtttacagttcgttatttcctcctctgtttccttttgtgtagtgggtgtgcaaaacgctgattcactttccaacagcttggcaatggccgaaatgacaacgctcgcggcaacgatataccgcaagtacagcaccacgatcgcgcctggatttgaagacatcacaccggggatcactgctcgattcgaggttttttatgacgatagattccctaagatgctggtatgttcacttgatcctgacttgcacaatccggaaatgacgcgtgttcaacactgatacccctgcaggagcatacttgcctcatcaaatttgaggagcttggtggtaatgcttgaggtagcgacagcgggttaggttgtagatatgtgcccatgggccgtggccccatgccctgtagctatcatattccaagggagatatccatggacttttggttccatatcgttgatcgctaggctgtagtgagcaattggtgctatcccggagcaacctgcaggtagggagacatgaaagaaggctgtccagcgcgcttgcttgcctttcgacccgaacctttggtttctgtgaacttggtggcaccaccagataccctgactgggacagatgaagagtcgagccgaagtgaggcgggcgccgaaaaggcctcaagggattaggttagagagctgcttcaattatgtttacaaaacacggtatacgcgttgtgaaaggcggtctaaaatcaggcataattcaggcatcaaatctacaaaaccaggcattcaaccacgagccgctacggattcggcattgaagtaggtagtgaagagtacttaattctagaagacaacctcccggctcgactcatctgtcggccgtccaaggcacaggacagattctgaccactcatctgcaggactgaacggttcatcattctcccaaacctttttcttctctgttgccagccaagcctctttcattctcgtttgaactccgtaagactccaatagcgcaagtgtcggattgaggtggctgaattgcggaagtgtgccatcgtataccaaaaggtatggatctcattcatcttcctggcagccatgaggtgcttttctccagttgaacgcacacaatcagtccgaatctttaccttagtagcaagattggcccatatgtcttcaacttttattagctttctggataatagcctttagggattgggtatacttacttcaaatgaaggaacgtccttgctcggaagaattctggagatcaaggatatcgtatacccaagaaaagcaatagaaaaagttctcatcgttgaaagcgataaaagtattggcttagcttttcttcgtcttcagagtatacaattgaaatgatatcctcttctgcaggcttatcaatgacatacgcaaccctttcctatccgtaaaagcagaagttagtgtctataactattcaataatattcggacattgacttactttcatcttcttgtgagtggtggctttccagtttttggtattatcttttgcaagattcaaagcagatcacatcctcttctgaggtaaagagtgctcttaggtgatatcgagattttctggttggcatcagtcctcatgtataaagcattgacatgtttcatatctctcagtaggttttcacttaccagcaaaagagtatgtgtacattaaatccttaaatggatccttatcagctatactattcactagtgccaggaattaccccattcgaagacccaaatatgctcccatccactttggtggtttttggtggtgttctgaaagtgaagagagaaaccagtgatcatcaacagaggcagcgacaccaatgcctcgaacataattatttgtagacccacatggacagggagagttgaagagtagggttactcgggatgtgcagaggggcaagtttaaagaagaatagaatgtgaagatatatacaccttcctccagagccgttccttccttttatagccactcgactcaacttccctcaacttcctcaactccacttgacttaacttcacaacttcatcttccacttgcagacatatatactccttgttatcacccattgatagcgtctctcattccaactacttttctttaacaccgatatgcgcttccacattgccgcacttctgggtgtggcctccttggcttttgccgctccatttccgaatgtatcggctcaccctcttcctgacggactacctactccaagccccagtgagctggaggtgattgagcagaattctcacggaactctgtcaaatgcacctcctcccgttggtatcagccaaggaggaatcaccaacctcaagcttatcgcattcaacgaactgtttgaagttgccttcttcaaccaactgattaaaaacatcaccgacagggccttgggttatcgcttcgctgacgaagacgattatgactttgttttggatggcttgaaggtgattctggctgtacgagatgatatttccgtatcgctcggtgacatatactgatatgacgcagcaagaggagctccatgccctggatgccaacaatgccttggcccatgtgggtattgacccaatccagccttgccggtatactttcccggtccatgatttcgataccgccatttcgctcgccaccaccttcacagatgtggttttgggaaccctacaggacgtcgtggagaaatttgctatcggcggtgacttcgcgctaacacgtggggtttcatccattattggccaggagggagaacagcagggttggttccgcatcatgcagggcaaggtgcctagtgaactgcctttcttgacgaccagtgatctcaactttgccttcactgccattcagagcttcgtcgtgcctggaacctgccccaacattgactccattccgcttaagacttttgcacatctcaacgtcatcatacccccgactgcagataccaaaaacattaagttttccttcgataatcaaaaaggtatcgaccctagcaccctttggctcacctatatcaaccagcaaaatctgccgatcgtggaatctctccgggttatctccaaagaggacgagacgattactgcagaggctttgttcccctatgacgcacatcagatgaacgggtttaccatcgctgcggttaccacagccaaggggccattcccaaatgcatacagcgtggcgaaagcgactctcgccggacctggccttttcgtcatcgactgattgaactacatcctcaatcgcctctagaagatcaatacttcatacgcacatcactatcattagccctatgacttgagcacgacttgtacatcccatcgacttgaactagttctaggcttattacacttgtcaatgaataaagttcctgacttcctcaacataaatcctagtagatcacatgaaacatattgtttagatcgttggggctcctcggaaaggccgttcaatgcgatgactcttgagcacggccgttgttattgctcaagtaggcaaatatcgctttattaatgaaactgacaagcatggctgcggagatttttggccagagttgttattacgagcaaagaaaccaacaacaaactggattgtgcaaagcatatgtatttatgtagataatcgggctccctgacctcaggatgtcccagtctggaatgatagcctggagataacctttcaaggttccaaggttacccaccgggtggctggtgaagtacccatggacgtcaaaagacaaatgtacatagcaaactcaccttaaagcttaccctggccagcattagcagtgacactggcaacaacagccgtgtaagccgtcgcagccgcaatattctttcctgagaaattggtcaagaatgcagtatcagcctgactaaaggttccggaagacccaaatccattgacctgacagacccgaccaagatacgtgctgcagacagcattggtggtggtatccggcgacgaaaacaactgtccatcaataggcgactcagcaacagccacaatattctggaacacatttccctcagcgagaacatatccgccggagccgatctcgaacgcgtgtcccgagttctggtaccagtagttgttaacctggcgtgtgttagtatgtattcatatttccaaaatagaactcccgagagagttgatcttcccaaaagagaattaaaactcaagaaaaaggcaaaattgattcaactcacagcatgcaaaagtgtatttccctgcacctttggcgcacgtccactggtgtggtagatgtagttgcccttcagggtaacgaggtcgctggatccgtcgaggtagatgccccagtagtggtatccgtcgcaggtggcggagtaatcggtcacgccgttgatgtagttgttggagatggtgacgcgcttggaggcatcagtaccgagcacgatgtgttggcgtccgatgcgggcggttgtgacgtggtcgatccagactaggtctgagttgtcgatggtgatggcatcaccgccccagacgtacttagggttgatgtcggtgatggcgatgttcctgcgtgggtgttagtttcgggatccggtttaattgcgtatagtatctgtaggtagtagtaggcagtatcttactggatgatgatgttgctcgcaccgctgacgattcgcagacccttgcccttgatgataccagccgagccggagccgatgagggatttgttggatttgacggttatgccgaggacaccggcgttgtcactgagagagccagtcagtatggttgattggaattatggggtgtggaatgcgtactagctgacagagacggagggtgcgtccggctcgtagttcgtgcaccagtcgttctggttgatggcaacctggcaagcagacgcagtaccccaaggcgcgcagccagtagaggtagtagttccctctgtgctggtgaagtcgaaggtctgggacaggacgatcacgcgcgctgaagagtcacccaggtacgagaccagctcggctgtggtgctggggtagacaggcgtggcagagccaccgccagtgacgcccttggcaaaaccctctgctgcgccggagacaccgacggccgcagctcgcactgcgagtgctgcaaggatggctgcgatcttcattgtgggacctggtaattctacctaggtctgggggattggagtaattgggtgaagagctgagggaaacatgtcggtcgcggtgggcgtagtcttatataggaacaagcgatccgtctaatgcagatggctctcccaagctgagactagcatgtttgagaatagaatctccgcacccgggtatacaccgtcagagtgaagccgatgttggcccggcacagtaccgaagccctaggtcttggtttagcatagaaacgtgggccccatgtatggccgggtattagcattggtgtccaccattttgcggagaaaagcaacgagtcgtgctatgcaggggttagatttggagaggagtccggaagaattgcagacgcgtaatataggaggtgatagatacaccaatcgggtgtgactgggataattagtatacaaggtcctccgtgaatggcaagttgcaaacattccaggaattaaagtagagtgatccggcgccacaaagtcgtaaatcaggccagcgttggacgatcggctccggtgcatgaagatgtttcacctctgggatgttccccacatttgtaacagttggagtaagcttgacagctttgtggccggactttttgctcaatgaacatgtctccgaggtccaattgagtctctcctttttgtacggactatggtatgtgttcattttctgatttatcccgcgcaatgcccaagggggtttgggggacgataattcctccgtcttggcgatttcctccgtcgatcttcaacaaacagtttgttattatcgcatcaatgagatgcgaagatcaggtccagcccatgatctgagagttacccaccagagctgtcagatgagatccactagaagttccgtgttcgaaataatttcggggatttgttggagaaacattgttagaaatatactaattggcgtgtttcatatagaaaggccatagaaaaagaaatggatgagaatctctaaatgaattctacccattaaaacagtctagtctatataacgaggtgtggtatacaacaagaaggaaaaagatgatcacacggctatacccattttgaaagatgatccactccaatctcgcctagaaagcgacggggagagggcgctgcaggtagccgcgccactcaggcagtgcacggtcgtacttggcgccgtggttcttcttcagatcctcgatagcactggcgtacttgatcaaggtggcctcggagaaagcagtgttcatgatagcaaggccaaagggcatgcccgagacatcgctgacgccaccaggaacagtaataacggggtatccagcctgggcggcaatctcaacgctctgggcgacatcgggaggcacaaggagaccgtcgagagtacggttgccgtgcttcaaagcagcatcgataccctcctcacgggtagtgcgccggcagaactccaaagcctggaagtatgtctcgttcataatgcccttgctctcaagggaagcgatgagaccgtcctggccagagccgaaggcagggtggataccgggcagaccaccctcggagccgtagttatcgatgttgtactggacgaggtcctcgacagagcggacgttagtgttctcgacctcggacaggtagtcacgcaggttgttgtagaagtcaaccttgatgtaggagtaagaggactcgttggagtagccgcgggtggtgccatagtcccagttccagccgtcgggcgagacaatctccttatagtggggcagctcggtgccgttgatgacggtggcgccagcggactcgatcagcttgaccagatcaaggagctgggcgatttggtcggcgtcgccgagggcccagaaggacttccagggaataccgaagacggcgcccttaagagcggtctggttgctcagaaactgggtgtatccaccgacgggggtgagaccctcctgagcggaggtgtagttgtcgcgggggtcaatgccgtagatggcatcgagggcgtaaacagcatcacggacggtcttgccgaaggtgccgacggtgtcctggtgggtcgattccgggatgacaccagcacgcgaggtcagaccgacggtgggcttgatgccaacaatagagttgcgctgagcagggttgatgacagagccatcggtctcggttccaagagcaataggcaccaggttagcagcgacagcaacaccagagccagtgctgctaccaccggggttaacggtgaagttgtaagcactgcggcactgaccaccacgggcactgaagccttcggagtagttgttggagcgcatatcggcccactcactcagagcagccttgccgagaagcagagcaccggccttgcgcatgccgtgaacgacatgagaatcacggggcacgacattaccgagaagagcccagctgccggcagtggtctccaaacgatccttactggcgatgttgtccttgacaatgaagggaataccgtgaagaggaccacggacagtgcctgcagcacgctcctcatcgagcttcttggcaatggtgaaagcatccgggttcacttgcaggatagcactagcaaggctgttagtcaacaattttgacgagattcaacataactaacatacttcaaataaggctgggtctggtggacacggtccatgtagcactccagcaactggacgccagtgaaagtgccattcttcagctcggcttggatctgatcgatcgtagcctcctccagcttgaaaccgtgacaggggcgcatagcgaactgtgcagcgccattaccgcccaggcgagggaagtcataaaggtagggatcgacgaggatctgggagtcgaccaaacagtcggactcttgagcaataacggagctcaccaaggcgagaccgctcaccaatgtttgaattagaggtgccatggtgataattagattgccatgtggcagaaatgccaatattttgggggagttcgtgctgttatacggagtacccccgacaacataccgtggatccctcggtgcccctgcaggtgactaagcaccaataaacccgcatttgcaaaatattctcatttccgctgttttcaatctttcgcacttcctttgggctccgttctttctatttgatctgctttgggcggcttttctattcaatcttatcttattccgtccacatctccgccaaaccatgggaagaaaatgttcaaggcgaccgagatggccgagttgaccaaaatgggccgtttaatttggagatgtatcaattaatctatatgctagcgcgaaaaactttggtacggagtagttggcggaaccgaaattacctgcctccaattgctcgtttaactggatccgaagaaacagccgactccatcgaatgctatcgtaaccgagtgcgctccatttgatcgggcgatcgggctagcagctcgggaagtctcgacccggaacatttgaactcggagggacctgaaatgtcatcattagaaactgattcctcaattcctagcctctagaagaaagactgaaaatgaaggtcggtccttaatagagagtatagaggtgaagaggtgaagaggagaagggacatagctcaatttcaatttctaagagcacccgcgatcgatcgaatcagatccacagtccggagtacggagtagaaaatgtctcttgattggttgcctcgtgccagagattctgcgactagctcggattcctcggcccatgcattgcgtggtgtagattttgattgagcatgtcgcatacgggggcctatgaagtcccagaatatccggaagacggtggaaaagcaagccgcttggagtcaaggcgtgtgctaaccgatttttcacgtgaaagacgcagatcggattagttcagcagacttagggcttgtcttgatctgttgctactcttctatactccgtactccgaactcagttgcagaatattaccccgacggctgattctattattcaccagaaagtttaatgtgaagaatgcaaccctgaaacccgggagcttctccataagcttcgattacgcctttgaacccgcggttccggaggtttatatggctggtacagagttcccgttggccactggcatcctgttccctttgaattattgaatgttaagacccgcttcgagaaaattatgagaattatgccattattatcttcccgaggtcatacaacgtcccagaccttgccctgtgatgtcgttatgtgcaaggtctccttcatctatattcttctatctctaccaattctgatcatgtcactttgaaacctggaatgactgtccccgtcgatatccttgctgcagatgcagcagggagaatccctagcggggtctcgctccaatatctagcagagtctcgcgataggtccgccattgtgggaatcattttcatggtatgcttcacgggcttgttgatgattgtacgtctatatgcccgggtgttcattgtgaagaagactggtctggacgatgcattggccatcctgacattggtaagatcatccacttttcaccccagatctgcacagttagtgcatcgccctcgagccgtgcgcgatagaatggcctatgaatagttacaaaaacataatccactaacaatggcccccatagatgctctacattgcctttgtcatcctctccatcgtcctgatcaacttgggaagcggtcgtcatatcgaatacatccaatatgtgctatcacttcccacggtccgcgaaactgaagtcctcgacttcgtcgcccacattctctacacaacggctctattcctatgccgtctctccggtctagccttctacttccggctgacagcccgctcatcaaaactcaacctgagcatcatcatcgccgcgccgctccttctcgccgcatacctaccacaactcttcctcctgatcttccactgcaagccggtaacaggactctggccctacgagtggcaggaggagccaaagacctacaagtgtctctcatggggactcgtctactccgtgaactcagggctatcgctcgcatgtgacatgctgatgttcgtgatcccggccgtactcatcaagggactgcacgtctctttagaaaaaaagatcaagctatcatttgtgatgttccccggtattttgtgagttcccaccccaaaattcttattcaccaagccccacaaaactaacaatacacagcgttatcgtgatctccgcaatccgcgtttggctcgtagccgcaggtcaatgggactccgacggcagctgggcctacagtccgatgctgtgcgtcgagagcgccgagattgctggaaccctagtcgcgctctcggtgccagcggtgaagcccgtcttcggaaacctattcgcacacatggccgagtatacgtccagccacacgcgctcgcgctcgcggtccacaaaactgcacagcctcggccattctaaaactattcccagtgccgcgatctccaccaatcgggatagcaagcgtctcattaactggtctaaaattgggatggacgattatgagatgatgccttctgaggtctcggtttcgagggatatcttaggtggatcgagggggagtgatcgcagtgaagaggcgaggcataagatgcacggttcgcggagtcccgggattcgggtcacgaatgaggttaatattactcgcgcgcaggagagtgaggttagggttgaaacccccaggtctagggggagttagtggtttcttttcttttgttccaatctgtaaatagatatatactagacgacttatatcatgtaaaaagtatttcttcgggtagcctacgcgccctacatacatggcattgactgcgcattttctttctttatcagccaatagtctatgaacaacctggtcatccagttttttgtcgccgtggcttgagagtatcaagcatgaaacgaatgaccgaagcattatagccaaagccccggtttcccttggttgaaaacagccctcgatatgttcgtgtttgagaataaaactcgtgatgtctcgccgctgtctaacggcgaagcgctatatttgggacgttttaataacggaaatgtgatagacatcatttgcaacagcagtatctagagccacgcataaataaagccttctgtctcgacaggaatctcgacaggaatatcaccatcttcaacctcatctatcatcatctatcctcatctgagcccagctcaagttatcaaatctacaacctcaatatctaccttgttgccgataccatgtcttcaagagctggtcttgccagccgtcaagctgctggttctcaaatcagacaagcacctccactcaaccctccacgctcgtatctcagagtccccctcgatacacccatcactccactcgtgtcctgccatggaaacagccatatcaactttccaaaaaccatcaaagattactaccagctcgattcgatgacactcgacagtctgatggtgtttttcagtcaaatccgtcccgaaaccgcagatactagacggtatcccacgattgtcgctccatggctcacgtgggattacgagcgggaagggtggcagacagacgttatcgatatcgaaagcaagcgctgcaggttcggcgagttcatcggtttaaccgatgagcttgtggatcccaaactcctcaacctgcgaagattgcatgcggagcgtgacaagcccgtgcaaaccccctctggtgaaacgccctccggtgcgggtgctgtgcaaaggccaatgatgagacgggagaaacgaaaggggcttttcaggcggcttccttttggtaaatagtggcgttggtaatttctttttttgggagtcgtttgtcgttggaggcgttaaatagtgtggcgcttattttgttttagtgagacatgaaatgatttgactttctggcctgagttggattattattcggcgcttatactgttggtgttattgtggagatcactctactcctcctgcgtgaataaatagttgcgtaagaaggagagattagcttcatacaatatcaagactcggtcgttcgagtatcatcattgattaaaattcctggagcaggctcaaatacaatgttgtcatttgccaaaatgaaggagccaatctctttagggtgttgttcgagctgttgaataatcaatcctggtgattaccaacctgatcaataatagagatgattctagtgcgaagatatttacgatcaacgtattgtcatgatgaaaatttgatgtataaaagtgtaagaacacttgtttttctagagaatgaaatatcttgaatttgacctgtcccagtgaaccttggccaaacacgttcataactcttacgatccagaatgaccctcaaatacctcattacaggagcgactggaggcctcggtgccggagtcctgtcctaccttgttgcgaatgtcccaccgtcagagtatgctgcagcgtcctcgaaagaggaaaatcgcaaacaattcgaagaccgagggatcgcattccgaatagcaagttacgacgaccctcagacattagagaccgcattcgaagacgtagagaacctcttcttcgtcagtaccaacaccttcgacatcgagaagcggcggaagcaacaccaaaacttcgtggaagcagcgaagaagatgaacgtgaaacatgcaagtcatcaatctccccacgcaaccatcccagctaacatcaaagccacaggtatggtatacatctctcgcattcggcggatacaattccgactccaaggcagctgttcaacaaggccatctgatgacagaggaaatgatgaaacagtaagctaagccccgaccgtgacaatgcagtcactaaccccagccagggccggtatcaacttcacctctatccgtgagggtctgtacacagacgccttcccgatcttcatgggctggtatccgagcacatcgaccgtctacctgccctccgacggatcgattgcctttacactgcggtcggagttaggcgaagctaacgcgcgactgatgatccggggtggacacgatcgagaaatcgtgctgcttactgcgcagcagactatcacattctctgagattgtggatctgatcaacgagacgaccggccgaaatgttcagatcgagcttgtctccccggaggagtttgtgcagttgaagacagctaccgacgagggcgggaagtcggaagggttcttccaggcactgttgtcatggtacgagggtatttcaaagggggaaacgggtacgattgatccgctcatggcggatgtgctggcacgtcaaccagtgccgccgcttgaggctcttcgggctttcttgacggagaatcgggactatgagtggcatcaaaactacgttaatcgcagttagttgttgactgtaatagttggatatatagtatgacaattgtcgcggtttccaatggctaataagttcaaccccaccgggcaacgggccaacgggatgacctcatgacctctgcccagtggatggctgagtcatcactcgagctcccctacatagttacgtcatcccataccaagtgggtccctagttacatagtctccagttgatcaagcacgggctttagatactccccagaagcgctggagtgttcggcaaattcggctgtctatagattagcgattgactatccgaagcatgaactgaattattaccatcctcagtcccatctaggacaatctcatacatctttccacttaggagaatggttgcagggcttgtattagaatcagactgacggggaaattgggccgggacatggagacgaggataactcgatggcgctagaatggaacacattactagttaatatatggccaacttctatagatagaagagtctcactaaggccaaagtgttttgtgtcatggaaaaatgtcagtttacaccggtctctcgttgatgctgttgagctagcatcacgaaaagcttctccgacggatggggaaatgagcacataggcttggccagggttccctataaccacgggaaccttctcggagaccggtctgcctgttgcatcaagggcgatgaattcagtggcgatatggtggaaatggcgagttggagaatctctggccagggcccgcgaaagggggcgaacagcattgcggaacatgaatacagccatcagtagagaagatctagagaaccaatcaatgtggagatgataatctgatgctatctgggctactccatagaggataagtcaagggaagaaaaacagctcaccgccctattcaatagccggcctctttccttgataacaacagtagggtggttagccttttcgctatgtagtcttttaatgggctttcttaatgtctttcttgtaaatctcttctctcctttcttaagctttctagattgagggtatcaaacggtagaaaaaggcttaaagtgggaaaatgacttcttatagttacatataagcttccgtatagttagtatacagtacctacatatttttcagtggctcaggacatacaccgatcctaacaacccatactagccggtggtgaccagctagctacgtactttatactcccttcactccgtatgtgcatatgttgtagtatcgcttctgctaatgatccattgagtcggccggaggagccgttctcccgtctcggcaaccaggaagtagcattgaagcctgaggcatccattttttgtggatttcgacctgggcgcaatcactgatcaatggaggattggagtggttaaatgggatgattgatgtattttctgaatgagatttcattgtcatttccaattgaccaagattgaatccatatatagccatatcactgtgcagtgttcgcagtagccaaattcctggacctccaagtcgacgccgtgtccgcccgaggcttgtaaacacctctgttctgattggctgatatccgctgatgtcagcatctagacacccgtcaaacccgaggttactagcgagacaccttcgacctcatttccttgaagatctctgttggtttgtgacactcgacttcgtcgtcgctagcttagacacttctgaaacctctcctctcttcctcatctctgtgctatcaatcccaatctcctcaccctcttcatcctctctttcctattcacatcggtgtttttttcacatttccgattacccgtcatggcctccctccgtaccacttcgcgattgttcgcggcgtcgcggccgatgttccgccctgccttcgctcgcacctatgcgaccgtcgagcctactcccaccgtgcaacccaagatcaagaccttcaaggtctaccgctggaacccggaccaccccagcgagaagccccagatgcagtcctacgagctcgatctgaacaagaccggacccatgatgcttgacgcgctcatccggataaagaacgagctcgaccctaccctcactttccgcagatcttgccgtgagggtatctgcggttcttgcgccatgaacatcgacggtgtcaacactctcgcctgcttgtgtatgtatctggatccgcacgcccgagatgtcatagcatccgacagcttccgactgaatgctaatcctttgtctgtataggccgcattcctaccgataccaagaccgagtcgcgcatctaccctttgcctcacacctacgtcgtcaaggatctggtccctgatttgacccacttctacaagcaatacaagtccatcaagccatatctccagcgcgatactcacaccgcagatgtgagttattttatatgccagcatcacctccaaaaactaacaattttgccagggtctcgaaaaccgccaatcccccgaggatcgcagaaagcttgacggtctctacgaatgcattctgtgcgcttgctgctcaacctcctgcccgtcgtactggtggaacagcgaggagtaccttggacccgccattctgctccagtccttccgttggttgatcgattcccgtgacgagagaaccgccgagcgcaaggccgctctcgacaacagcatgagcgtctaccgttgccacaccattctcaactgcacacggacttgccccaagggcctgaacccaggtcgcgcaattgccgagatcaagaagatgttggccgtctagagttgtggatataaaacggagtaccgcggaattttcttttctgtccaatgcctttcctctgtctctctatttcctgttttcttttccctttttccccgactatttcacggatgtttctataggtgtaaattgtgaactttgtttcttacaggaatgcactagtagtccattcggttgtatgatgatagcgcatcctatacatttgtattgtaccaatcaatcaatcaatcaatcaatcaatcaggtgtctggaatttccgtatgagtccactatatctgcaatcaatattgatcaacaccgcggtattccttcatgacatgctaagcgaatcccagaacacttatccctctaggcttactcggctatatattctcccacgctaacaccactagcacgctaaaaaggcccggcattgcatccacaaatcataatgcggacacgagcgatactcaactgggctgttagcacagttggtagtgcgcccgcttcgcataattgcgagcgtgcgggaggtcctggtttcgattaccagatagtccattgtcttgtacatctttttggctcgaattttcctgcatttttcttacctttttgctttgtcctcttcccggctgcagctaaaagcgggctataaaatccaacacttcaagcgggattcccattgggccgctcggatggcgggcttacgcgggaagtgcccagttatcagccaatgcaccgcacgtcacatcctttcgaaccagcggcgctccattgtttccggcgctgatggacaaggaggattgtgcccgagtcgaagctagcgtttgatgcgcctgcacctgcacagtgggtgaaatgagattattcgacgaatggcagctctatatagtaccttagcgacctgccgggccgtgataatatccacaatatggttgtgttttctaaataagcatgttgaatcaggaaagagatgaattgtacactaactatgcactgtctactccgtatgcaccaccgatctcgtgcgtcgcgcctctcttttaatctaaacccatgtcctcacccctcctatataatacatggccctcgctcctcttcctcgctatcagtgagccggttcgactataatggattccttgatactatacgtggcattgccgctgggactactggccttgcgcactgtgtaccatctgtacttccatccgctatctaagtttcccggtccaaaactcgcggctgcaacctttctctacgagttctactacgatgtgatcaaaagcggcatgtacatctgggagattgagcgcatgcacgagaaatatggtgagtatacagatccgtcaatatcaaccataaaagccagaggacaacccctcatacctcatccaggcccaatcgtgcgcatcaacccacgagaaatacacatcaaagactcaacctactacgacgaaatccacgccggcgcctcgcacaaacgctctaaagaccccaaatacgccgtagcctttggcgcgccctactctctcgtgggaacaataacccacgaccaccaccgcttccgccgcggcctgctgagcagctatttctccaagcgctcggtggtgaaccttggcccgtccatccacgacaaagtggacaaactaatcgcgcgcttcgagcaagcccaccaagccggcgacgtgctgcacctacaactagactttgctgcgctgaccgcagatgtcattaccgactactgctacggctggagctacggctacctagatggtgagaaggggtcgcggagtaacgacctcgtcgacgcggtcaatgggctgatggttatgttccatatcaaccggttcttcccgttccttatttccattttcaggaatgcgccgcctaccctggtgcgctggctgcagccgcacatggcggatttgtttgatttgaagaataggcttcgacagcaggcggatgatactctgcagaaacagagtgtacggaaggtcgatactgaggggaggtcgactatatttgatgcgttgactagtttggatttgccagagaatgagaggacgcttgatcggctggaagatgagtctgcgctgctgcttggtgctggtacggagactacggctagggctatcactgtcgcgatgtttcatctcatcgacaagcaggatatcatggcgaagctgcgggcggagctgaagactgtgttggcgacaccgctatccaaggcttcgtgggcggagttggagaaattgccatacttggtgagttattgtttctgatccctttgttacttccgttgtggattgctgatttcgtcattccctggactagacgggtgtcgtcaatgaaggtctgcgtctcagccacggcatgacagcccggttggcacgtgtttcaccgactgaacccatgctctatcaggattgggttatccctgcaggagtaagtaaatgatactggctactggcttactggctctaatcttccggttcgattattgggagtgacacatgacggcaaacctaaagccgacttttttgggggatgctgctgatactatgcattgcagactcctgtcagtcagtcgaactacttcgtccatatggatcccacgctcttccctgagccggagaaatttgacccagagcgttggatccgcgctacggcgaatggcgagtatctgagtaggtatatcgtctcatttaccaaggggagcagacagtgtctgggaatgaagtgagttgtgcatatgtatctgcctgattttatactaagattttatctagtcttgcctatgcggagatctacttatctttggcacatatcgctcgtcgcattgacttcgcactgtatgaaactactgctgataatatctgtgtgtatcgtgatatgggaattgggtgtccggaggttgggttgtttggtgttagggctacggttgagggacttgtagaggaataaggttgtgttactgtgggctgtgcaagtttcctctgtgatcatggtcatgataatataggagagtgaagcttgtacttttgtcgatattaagggtcttctgcggtgctatttgacttgcgtgttggttatgcaggtaaccgcgttgtggggtatgtttcacttggtgaggtactgcatgactgaatgatgacggatatttcattatgatggttttggatgtattcaattacgcgatgtaacggatgcacttgcgacgatatttattgcatatgtaaagtcaacctcttttttaaaattgactctagatggtctatcattgtaaatccgccaaacatcaactgaactgagtagtagacaatatattttaaccagcctctgtccatattaagatcatcaaagtagggctagtatcgggatcatactcatgatggaacgtaacagacttcaacactctatgaaatatgatatctaaaaacacagatcagatctgacgctatcctgcgaatgtgtgacaacaacgcagaaattaaaaagtacatccaatcaattccaatgcaaagtaagttcgggatatcatgtactggttggctggtggtgcaaggggggttgctaggggatacctcctgcgtgccagaatatcccctacacattcatcaccctttgaaccaagttttgacgggggttgatcaccttttgtgtatggggtacggagtagacgtctccctgaattatacctggcacagtactagtatacaacataatctgttcttcctaggggtcatccgggaccatccgcctaagatagctaagatagaaaatgagcaacaatctactttagaaacctatcaccctcattgtattgctttaacctacgtattcttcgctcgcatctatgagggaactgaagggagctttatgtgtacaatgtcacattacctccgtcatccacccgttgggtttgcacgctttgactacgtaaaatgttgatcgttagattaatctccagcctccgacaagctatcctctttcctgggcaggtccccgaggcgatcattccacaggagcatacacggcacatggaaccctttgcaaccctccgataggcatagctccctgctatgtagtcgtcatctcagcgatgttgatcactattaatgagagcgcgaggcatggaagatacaaaacaacagtttatccaaagccttacatcgcctacataaacgctagtacaaccctgtctacaactatcagccagtctttcatttgcttctctgaccatctatactctcatttattcccgaagacccacccaggccacttaaccaaaaatgcacgtctcatacatctccctggcgttcttcgccgtcggcgccatcgccgcgcccgccgctcccaagcccagcaatgacttcggagacatcactggcggcttccctttcaacccaaccggctcctccagcattgaagacagtgatgagggattcggcaactccttcccctccgccctcgacgcaatgcaccaggctttggccgagaagcagcagtccgctgaggccgctcagcatgcatcgacctcccatactgcggtacccaagtccacccacgcagtacagaacttcccggctcctgtcgtctcccaggcctcaagtctctctcaggccacccctgtcgcctcgcaagctcctgtgatttccaaggctgcctctaccaccgccatccctactccatcccacggcgtcatccctactcccaagggcagctctgcttctccttcctctagcgcaactccctcccctagcccaactgcccccgctggccctcttagcggccttgtcaatggaattcccattgttggaggtctcgttcacggtcccctggctggcctcggtctccgtcgttgagattagtgttaatgtgatgtgactattgccttatgcactcttctttctttctttctttgtacttcagtacctctgtcaatggcttggtgcttttccttttccttttctttctttttttttcttggcaatcattcatatatccagtgactttaatttataaaatctgttttggctcttcatacattcttagatcgatgatattatgacatgaaataagacaacatctttaactcgacgggtatctccccgcagaccccaaacgatcaatgcatccctcaacagccttctgcatagcattggtcgcctcctccaacagcgtcgtcaaaggcaccttcccagccatctctgcctgcaccctcacatactcattattcaataccttattgatattgatcttgctaactccgcaatctatacacttcttaaagatctcctcggtaaacggatccgccccgtgaagcacgagcctaacctcccgaccaacagcctcattaatagacttcaaccgctcatactccaactgaataccgcggggcccatactctccatgaacattcccgaacgcaggcgcaagccaatcaatcccggtgttcacaaactcccgactctcctccggtgtcgtaagcaaaccctccagatcagccgtatcagcaaccccatcctcaccaccctcaatccgaccaggctccgcctccgtcgcgatcccccgcgcatggcagtactccaccagctcgtgcgtcaaagaaagattctccgccttctcgtagtgtgacatgtcaaccatgatgctgtcgaacccacccaggtccgccgcataccggattatctcgggtgtttgcgcgtgatccatgtgcacggttatgggcaccgtggctttgcgcgcggcttcggctgctgcgtgcacaagtagtccgtcggcatagtggatggcccacgggaagaggaggatcatggctgcggagcgcttggcttcggcggcgcggacggtcgcaaggatgccttcaacgttgtagcagcacattgcggggatgccgtaatggtttgcggaggcatggtctaggatgcgcagggcgcgattttcttggagagtcatttttggtttgggatgggtgggggtgaaggtgagggcaaatgaggggtttgtagttgaggtttactgtagaccgagagtcagtagtgttatatagtctcgttgtgttgtccgacttggtcgcttcacgtccgaactgtcggagttgctccgtgagtgacgtcactctgagctgttcgccattttgtgttatctacacttcctacacccattgacacgcaaaatatgggaaattataccggaggaaatcagactttcagtacatattgcccatattgtcggcaattgtatgatatacagtacttccactgcctgagcaagactaacaacttcgacagcagaattcaggcacggggaaagtagatcagatcaatgtcttattaggtttgttttagatgttaagcataaataacattctatcaaatcaaatccgagagctaccttggttagctcttcaaatataaaaatgaagttttgcctgtggtggccaacttccgaacctctcccaagtacaacttcaacaagcacaagaaccaccagactcgcatctactaaccggaaatcaatcaacatacaaattccaaaatcggaccctggcaatccatcaaatttcggcgaaagccaaggtaaacctctcggacttgcgccgaaccatcccgcgctccaaacatcttcccctcataaacccccacgcaggtcgagccattttaatatattatatacattaacatttctccgggactattctatcaattgtatacatcattccctcatctaaacaaccatgtccaaaccctcaatcggcttcgttggcctaggcgccatgggcttcggaatggccacacatctcgtgaaagagggctacgcagtacacggcttcgacgtgttcccggcctcggtagaacgcttcaagacggcaggcggaatcccagcgtcttccctccaggactcagcaaagggaaaggacttctatgtttgcatggtagcctcagcgccgcaagtgcagagcgtccttttcggtgatgacggcatagtcgcaggtaaaccaccaacccaaccccaaactaaacaatatatatttgaaaataaaaactaacccactcaataatcaacccagttcttcctcaaaattcaacccttctcctctgttccactgtcccagcatcatacgcccaatccgtcgccgcagagctcgcctccatcggcaggagcgatatagctttcatcgatgcacccgtctctggtggtgcgctccgcgctgctgcaggtacgctgtcgattatggctggtgcacccgacgccgcgctggagaaaggccgcttcctgctgcaggagatgtccgacgcgaataagctgtatcttgtccccggcgggatcggcgcaggtagtaatatgaagatggtgcaccaggtgctggcgggtattcatatcctgggtgctagtgaggctcagggatttgcggcgcgactggggttagatgctgtgaagacggcggaggcgattaagtctagtccggcttggacctggatgcatgagaatcggttgcagcggatgctggatgaagattggcatcctggtgctagtgctttgactattattctcaaggatgtggtaaggaatcttgatgtttttggggctttggggataagttggctaattgagtttcgatcaggggattatcacgacatctgcgcgccaaaatcaattcccgactccactttgctctactgccgagcaggtttatttgtctgctttgctacagggatatgggcctgttgatgactcgtctatggtgcggcagtacttcgctgagccgataacgaaggtcacctctaccaagtctgatgaggagacggcggaggcgctgcagctggtgctggatctgatggaggtgactaacctcgttgcggctgctgaggctatttcatttgcgcgctatctcaatgtcgatttgaagcagttttatactcttgtcggtgatgctgctggtgctagccggcaatttatgacgaaggggttggagattattgaggggcctggacaaggtggggatggtgtctctgagactattgatgccgctagttctcgtctagagaaggctgtgcagaaggcgcgcgatctgcactgtcctttgaatctcggcaatgctgctttgactgtgttgttcatggctaagaggtctgggttaggggctgagggaagtgccagtgtggtgaagacttatgagcagtagtgtaattgccgagaatgagtgatgaggtatgaaaattattagtccaaattctacatttgtgctgagtccgcacgcccgatggcctatgctttcacaggaacatgaaccatccaccgaagaagctcatagatgatctgagtcaccgtaattaccgtcgtctctgccttattgtcgtacataggggcaaactctacaacatccacgccaataataggcaggccagcttgcgatagaccatataaaatacggagaagctcccgtctcgtccaacccccaggttcaatggttccggtcgcaggtgtgaaggcttttctcggtcagtataagttgcttaggataatcaagattgagtgtatagtatttaccggggtcgagcacatcgatgtcaatgctgatataaacatagttatcgccgactgtattcacaattctccgaataatgtcgttaattctaatcttatcgatcattcgggcacggatagtagtaaagctataacgatgacacggtgaatgggaggccagaaacggccgcttttgacgccgttttaggccgctcgctcaccgtgggcggtcttggcgtcacgtgggacaaaggcgacggccctgctgtttaatgccacccgggcgttctgttggatgttcctggtgcctgacccatcgatccagccctcggggcggaatgtatgttgtacctaccgagcgcgcaattttaatttttttttgctgatttgatacattacgataatagtcaatgtctgcgtctacctagacatacgcacagcctaagaaaaggcacatgcagcagagcttagatcacaattcttgaacaatgggttattggggaatgagcccggtgtgaatggactgggagcctggggaacaggctggtagtatagtgactctgtttgaatcatccccataaggatgttgcttacaccagaaagctgatactgataaagtgtgcagtgctccgacgccgtgctatatagccacgcgagcttactctgaatcagaataccacggcctgcaaagacgtcgatttgatcttgggtagtcacatccatatcgtgatctgcgacccaaacctagatgttttctagataggcatttgacgaaggtgtgagatgaaggagaagggatgccgcgatgtaatagaatggctatttctaccacttgccgcaccccaaattaggtaggcacctaggataaggcagatcctaatcactattggttgaagaaaccaacgcaatgatatgaaggtaactggtcgtaacggaggttgatacctgagtatagttgaaatacctgctattgattcgcgcttcttattaatttacatatctttggccactcagcatatgtttcatatattctcactcagcctaaagcaccaagacaaaggtctctgatagctcatcggtttgaaaagtcctcgcagcttgtgaccagggagtttctcccggtgatcaagtaggaaagcaagatctacccttccgtgatacattgcaccacttggacatactatctctttttcaatattttgcccttgccgctgagcttttcctcgtcccctagaacgacctgtacatatctagatctcacgcagcaatgatccatctaggagaaagtaagtctgagaagtcatgctcgttcagtgctgcccaagagcccccaccagccttggacggcagcaatatcaatgtcgagagcgagcaacgccaaacccagaatggacgggctagccccgaacaggccggaccgctaagccggatcccgagggcggccgaatccggccgggctggcacaaatgccgattctatctgaagtactatcaattaactactatttacagctagttataactttcctagtctctccgggtttttaaaagaatgtcttgataatattatcactaataaatacattgtgtgggtatccaaaatattatgtccagtcataagaccaattagtatgtacagcccaagagaccccaacaagcgcaggggtacctgaggccaaagaagatatatataaaaaaagaaagagagacatcagggatatcaaaagtcccaacccaaataatccaacgacttaaactcatttcgcatgcgacacacagtaaacatctaaacctcaattccgagcttgacagccgagatcgaatcagccgagatcctgcggtccttaataaacttaggccaggtgttcgtaagcacaaggtacttaatactggcctctgcatcatcaaagatcgaagcgttaaagtccgcagggatctcaccccagtactgcacgcggtctttgatcggtccgtccatctcagcttgcatagtcttcccagagtccacagaagccggcgacggcagatcgaaagtgaatttatcaaaggggctggtgggatcacagtcgcgctcctcgccgtacacaaggcgcgtcggtttctcgaaaacgtcttctagtttccgcagctcctggtgcgagatgttgacgggaaactcggcatggcggacgctgataaactccgcatagagatgcagcgcacggttgaagtgttggcggacgatatcgcgcttgctcttttcttggagcgcgctgccgtccttgatgcattggggtaggtggttgcgccattccgcaacgctagtcaggaagacgatattctcgccggagaattcgcgcagagcggagaactcttgtagtggagctggattgcgctcgaggacgtgctcgagtgcgcccattgtcaggatgctgtcgcgggagttgaatgtgctcgtcgagctgttcgatttccagcctgacatcatcgatgctaccattgtcatgtcggagtggagggacttttcttcggagctggcggatttgactttcaattcccagcgcgcgatcgagtcgagggtttcttgtcggagggatcggtggcgcattacttcccagcaggggaggaatactgtgaatatttcgatgaacatgatggatagacagatcctatagtatacctgcgttagaggagtaggtctttgtggttatgtgtggaacttaccactgaggaggaacgaagaccgcgttgaccggggccatggcgggggcgtagaggccgacgagccacatcggggtagcgtggaggttggaaacagcgcagccaatggtctggactctccagccgtgggtatcgtggatgttgcgagactgccagaggacgatgggggcaacgatccaagaccagaagaattgcgagaccacaccgggccaccattcccatcctgtgccctgtgctgcgagtacctctgccggggtaccatggactccggtgccaggaataccccatgagctatggtatttgcgggagatcacccacatgaggacagtgaggaacacctgcgtgagatggcgagttagataagatttctcatgcatatggaaaagcaaggtaatcatacctgagcaaacattgcgatggcgacgtaaataaggatcttggttgtatatccgagagcacggaagcggttgatcaacccatccttgtgttccaaggcaggcgattcagtagaacggtgtccatccagagcatattttctctggagctttgcgacatgttgaaatctggtattagagccgtggaagagcgccatgccacagggcaacagagtccccatgagccaataggcgccgtcacctggcataatagcgccgatcatagtggcgaactgggttggcagccagtataaatgaagaataacgatagaggttaaggatagagcgagacctcgaatgcgaagcgtcggcatatcacgattggcgatcagataggccataccgaccacgagggcggatgtccatacacatgcccaaacagcccaccagatggtgacggggccgagatcaatctgaggcttagactcagccgtggcaccgtattcggatcccatgttgaaaagtgctgaaggaatgtgagtgaagttgggtagcgcttggtcttttccagagtgccgggtcatgatcttcttatgtagaacatgcgtggaactagggccacggggtaaacttgcacgagcaagtggacccctaatcaggttggatgtcgatcataatggctgaattatccatcccactccatatttctgctaggaaacattatgttgtggagtccctcaatcgattgaggtatatcactgctcagttatggtcttgagtttggtcccgcgtggtggatggagaatatccacagttgctatttgtcaatcgatctgaggatatgattggttgaatatgaaatttcgagatcaaagatctcttggcagcacgaagctctccccttttctattgaatcagcctttgacgctattgattttccaagaattgtgttccgtgaaggaagtcgatcgtagccctaaaaaggcagaacttcacattttggtatgacgtttgaaatgttcacttattacagtgataggtgtaattatttccagactccctgctaccgctaatgcgcgcaaaattctaggctgtttcatacccatgtcaaattagagacaattctctactattggaggaatagaccaggatcacatggaatgtaagataatgactttgtcgacttggattaatatgtagaagtatccaaatttagcctagcatataagacacggaagagactcaaatttcaatagtagaataaaccgaaatgaaaaggttcaagctattctctgccacgacatacagaagaaatcgtaattaaaggaatgaaaaaggaatgaaatccataaatcgcacatcacttaatacgtgaaggctcaaaaagtcccatggctttggcctcctcctcagatcccgcctgcaaattcccagaatacttgatctcaaatccaggaacaagcagggcatccttcagacccctatccacaacctcctcctcagaacgcgcatacatatagccgtaatacgtgtattgccccgcctcagagatcgacacgctaacctcggccttcgcacaacaatcccgatcatgttcaggatccttcaatcccatctgaaaagcatctaactcacagtcagcctcgacataaccatagaacatccctccatagtaattaccacattcaccaggaaccggcgccgcatcacagaggcccatatgcccaacctccttcagggagatcgcactcataaacccagtgtacctatgacgcacgcgctccggcatcgtaaagtgtgcgtccttgcaacacccccatggatggcggatatccgaaagtcccatcgcgcgggcgtggtgcaaatcatccgcccgcagcaacccgtagaacttgccgtcctcgccggggatccgacggatatcctccagccagcgcttttctgcctccacctccgatggtgcatgcattactccatagtagaggtgaaagtcggctcgtcgctccgcacagcatcctcgcacatgaatcgggtcaagtaggccctggcggttcgcgtcgtcttcagaatccgccatcataaacccttcccactcacctgagtaatcgccgtacggccggatttcgcgcagccctcgttggtaggcagattcttcgcttgcaaacatgctgcccatgtacatgtgcttctgaggccgggggtctgggcctggtggggcctgttggctcttgggggatgtacaattgcgtggggaaatggcgatgctggtgtcatcggggggtgcggggatggaattcttcgcctcccacatttggacaagggactctgtgtcccagatatgggggtcttcttcgatacccagctcggcgttcttctcgcgccggtcgtcccggtccttctttagaagtgcggtgtctaggagcttggacatggccttctcccgggcttttttttcatcattttcttcaatgcacttcagaacggtcgcttcaatacgctgctgcacaaggtcaatgtcaagagcggactcttcggacgagtcatagtcaacctcagggctatcaactgagtccgcgggaggcctgtcccccagagcaggatgaggatggtctacatcagcaagataaatacgcacatccacaccggagtcgtcagcttcgggctgttggtggtcagtgtccacctcccgccgccgctgtcgcttctcgaaatattcgtcaattctcagcttaagtatattgtaccttatcaaagaagatccgcaaagcgacgatccagaactatccgtgtcgcagctgcttacattgctgggagtagcacatccagtgccctcagtatccggcgattcagtctcaacactttcctttgaatagtcactctcacatccgctatgggcaagatgagccggactggtcttgatggttatagatgcaaaagagtcaggatctgcagctatctcggacgaaccggaattagtacgagccaatttaaaggccgtgctagacgacctctcagaacgggccaggcttccgtaatccgactctgattcgctgacaacagcacgcgagcagagctgaccatcgtcgctgtggtcagtactacttgtttccctgtcatcgggagtgggatcactcaccatgcgcgcgctaacttcgatcacatggcctgtagcatccaggccttcaatcgtccggtaagatttggcggtttgcgtctggtcgtcttcttgagagacgttatcagcccactcgctctcgcactgcacgcacatgctgggctgggtggagaggaggaggtcgtgggagggtttgatctggttgcaggatacgctgctctctggaccggccaggcggatcttgttggtgtattcctggcagctggtcatgctccagttagagatatgtccgcagctgggatagtggtggtaggtgtgtttacacattctaaggaaaataatagatgagtagaaagcagagagaatatatgagatgagacaataagagagaagtaatttgccatattagataaatattcgcgaggatcgtggtttatatatactttgatctgtgagttgaggtagtctccgacaggcgagtacaaagccgagtcgttgaacaaaggcaagttatataacaaagacagagttaatggcattgttttggtcccatgatgaaactctctgttcaaattgtttgtgaaaaattgtgtataatgcattcccaaagatctttagcctattagacgcgcgtgtcaaagggacttgtgggaaacgcccaatcctcattgtatccaacccagatgacacgtaaagcaaacattgttgatttcatgttagcatggtttcctataggtctagtagcccagtctaaataaaggcagaaacaaatggcgtagagagaaagagctgctaatatcggacatgttttcctttttgccttccccccgctcttgaattctccctcacacatttgtcttccttcgtttttcatatatgagctgcaaagcttcgtcgtagaagggcttctccagtttacacaagaccagtatctgcttggagaagagctgacaaattcctgattgtccaatgcaaaagaactggattggaaacgcgaatgtcgatctgggaccaaggtgtctgacagctcaatcggtatctttcatcggacccggtatacactattcaccacataacagatcctgggcaggcactggaaagcataagagaagtttccaaaatatcatttcatgtacaaaagtcgcatttccgtaataacagtattcccatgaatatattgcctccaggacatccagtcagccctccaaatccgccaaatatctaactccagagtccatcagccaccaagaagcagtctcgtgcatccatctcaaaacaggcctctccaacggcatcctcctaccctcatccgctctcctccacataacagtctcactacaaaacacaaccttcccttcctcctccagactactactttcctcataactaatcgccaaccttccttccacaaaatccaccgtctccatcttaatctcaaactcaacccggtccctcctccgtaccacaacacgataaaccccacaaaccaaatccccaacctcaaaatccagcgcggcaagatatcccgtcttaaaactctgcttctgttccggcttcttgctagccatagcaagcatgagcgcctgcgggaaccgcgagaaagcggtcatattgcggcgcacgagtcttttaaagagcaggtctgtggcctcactgctagggaggcaggcccgcgggactgactctgaggcgtggtcgtagattgtgaagtactcatcactaaagacggtttccgggattgattctatacttggttttgtggatgcggtgagggttccaaggtgggacttgtgcgctatgcgttttgataggcgttcgtggaagatgtagaagtagattgccgacgagctggttattatcgcggttgccgtaaggatgaggcggatcattttggtttttcttgaggctgtgagatgtctacaactggggttttgttgcgaaaaaagtgatgcgatcatcggatacgaggtcggcttggcgcgtcatctgtccctacgtcttatcaccagatcgtccagttcaatgatttccatatgaaatcgtcatgttaaatcgtaaatcggtcaggtctgtgatcacatcgaaaagaaactaagttgaaaacgcgcaacgccaacccaacccagccccaaccaaacacagtggtatactttgagaagatgaaaaaaaaaacacagcgaagtaaacaaaccctcacttccttgcctcattcttcaaaacatttacacggccactattatgccatttcgcaagcttaacaccacacttaccacaagaatgctcgacatccttaagcgaggacatcaagtaagggatacagccgagacagcaacaaaagcaaagaatagcagcccagccactataccaaaatgaaaagaagatcaactaccaatccaatatttcaactatacacggaaatccaacttactgcgtagtcccaccgctcacagactcaacactggtcatctcccgttctccacaaacaggacagtcaaccggacaaggtgcagactggacacagtgcagcggtatggccgtagcatacccactaggatggctggaaggcatgtagaactgctgtgggtagcccggcccctgctgtagctgtgcttgtatgtgcgggtactggggcaggggctggcctgcgtatgccttgtcgagcggagcagtcgttgatggcgacgcatcgtatgcgggtgattggctggtggagtcaggtcgataggggtagtgttgttctgaggggccgtttattgttgttggggcgtagctggagcgtagggcgtctgagagggactgcccagtgtgtgaatatgtgtctgagtgtgggcttacagggcctcggttttgatggtctgagaaaacgacttctggatcttcgcaatatacgggggctggtgctggaggttgttaattatttcgtgctatatgagaatatgatggggggctcatagcgtactaggcgtcgactcggggtgttctgtgtatcctggcattgttgtagagtctgggggtctggagacagacagtttgatggggatacaagaaatttcacttgtttgaatggttttaagtgaaatctaacagcgcttgcgaatgtaacaagataaatgataaaaaatagagcggtcgatatgatcgtcaagggctaatatgtaagatgtaagtattacagtggatacctggggattccatgagtgcactgccttgaacagggttataagatatcaagcctaagccacgcaagtgaagcttgcagtatcacatagccagaagactaagagaaagccgtcgggttggtctgtcgatctcgcttttgactcatccgtgcatgaacagggattatctacagaaaaggctgttgatagataggtatgcggcttattttgcgaccaatctatatttggatcggtctacatgaaggggctagagataattcaattcatcataagccggttgatgctagcatatcgcagctcaattctattccgtacatattataccaagccccaacaataattcaaataaaaatccagcccatttacactggcggttataacattattacaccccgacgatcgtaaacgcaaacctgatcacacgggttgtggccgatcaatgcctgtctgagcctttgaaggctgagtaggcctatacgcaaatgctccttagtttctcgatctttggcccccaactactatttggaatacactatattaattgcgcataggcgtattgtaatataaagtgagatatatacatagataaggctacatgaaacaagatatagatgtacaatcactccaaaacatggcctactaaagacctaaagccgaaccgaaaaagatataaatcgatttacgctaggtgccagatgttatacgcagactcatagacccccaagccattagaaatattgatatcgaaccggtccccctcccccaggataatacccatactgcgcaaaaacccccagaatctcactcctctgcattatccccgcgtaagccacaaccgtctccgtccgacgaatcccgcctttaacatacggatccgccccgcgctccatcaaaagcctaaccatctccaggacattcgactgaacagccttatacaatggcgtctgccaaggataccgcataagatcgaccgccgcaccacgatcaagcaacaacctcgcaaccctcatattcccattcaacgccgccagcgccaacgccgtatcccccgtactattaacagcattaatatcagccccgcagtccagcaacatctccacaatccgatcctgtccatacgcggcagcctgcgagagcgccgtctcgcccgtccccttacccgcattgatattcgcgcctgaggcaatcagcatccgcaagatgcggtcgaagccgcgcgctgcggcgacgccgagtgctgtttcgcctttcagagcccgtacgttcatgtctgcgccgtattctagtagaaggcgggttgtggcttcgtggccgaaggaaacggcggccattagggctgttgtgccatcggtgttttgggcgttggcatcggcgcctttggagaggagggtttgcacggtttggtgttggttggcttttatggcgactatgaagggttctcttgagctggtcatttcccatagaatgcggctcattcggcggggcttttttgagtgtgtggaaactctgaaggcgtggaggtctagtgagggttttggctgggtaggttctgtcactggtattggggggttcatgtcgttatcttgattgttctctgtaagaaccgggatggggaagtcttcgactggtaacgcttctttctgtgtatctgtgcaatcttgcatgtccaacgtcactggtattgggaagttttcttctcgtattgtctctttttcaggatatggctgctcctggattgaatatgagctgcgcttgtctgaaaatgagaaaccttttggcgggagcgggagaaatgggaggccagttggctcgtctgctagccaatccttgtcgtctaggcttctctgacgttctaattccagagtttttgatagtgccgtagattcaaggacttcctctaccggagccgtgttttctctgtgaacaggcagaaggccatatgtctctgctgtcttttgaaaagtcgagataacgaagtcccggttcagagtcaacaaatccgaagcaataccagtagcgaccaactcttcctgtaactgaggccagattctgtcttcctcaagcttcgaggaatccttcaaaatatcagaaatagccaaggcctcctttgtgccagcacgaatgtcatcgataaagcacctcagtgcgcgctcaattatcttctgggatgatctgtatcaatgttaaaatccacactgacccacacacgaacataacaaacacacatcatcatattcagattcacctcggtaagcccgaaaataaccgaagagagccgcgcgcgaatgtcagaaaccagactctgagccccgagcgcatctggatgtagaagcagcttctgcaattctagcaggacaacatggcagctgtacaatctttttttcaaaactgcgagatggacgcattccgcccctagagaggaagtatacgcctcggtcgcgcttagtacggtcagaagcaggccgagctcattttgggcctggttcgttagggccattgacacgcgcgttgactcatacagggagtcagctaatagtcggattgcggtagtttggtgccatggttgactgcctgcttgtagagacatggtgctgggctttgagatagtcaatgggactaggccttgcggagtgctgggtgcgataccaggggccatctggagagggcccgtgcagcatcgccccatttttggcctccttcttggggttcgattctatttttggagattatttcaaggtagacgatgtgatatgttattattaaatgaaatgagaagtaaagagagttagactcaatttaagaatgatcagggaatagagtagactagatcaaatccatgtgtgtagcctgcgagggattacaacctcgacattcatctcataaagatcctctaaattaggatactctttggttgatagacattggagatcgagaattcgaaacacacaactacatctacttaatgttactagtctacaatgaaagataagtcaaacagataaacatggtctattcaataacaacaaagcaagcagggaaaccaaaagaatttcacgggcgagaatggctttgaaggcaaacacagggacccatatccagaggcagcggctcactagagagcaagatggtactgggacgaatatcatccaaatccgaagctacaataaagtcaacgctcgcctgtggctctgcggacatctcgtcagcttcaaggtcagcaatggctttcgtcaagggtgccatgatgcggtcacaacacaagcgctcgaactcagccgagaagtggtttgcaggtctattacggacggtgcgacaacgcggacatgcccgtgccatctcttcacccaggacaaagatggcctcgagcagccgcgccaatttgtagagcactggaatgacttcggggcggaggccgtctccaagtccaaggaaccggaactcttcgaatagagtggacttgaagcaggcgcatgcggtgaggaatcgcttttcgtagttcatcctgtcggcctcttctgtgcctaggtatctatttgagctcacgttgactatctgcggcgaagaatagactggggcttgcttagatgtaggtatgctcacctcgagtcttgcgtgattgtagatgataggagggatagcttggacagatgggaaaatcctatttatgctttttcagttgacgttgactggtttcagacaaagactttgatgattgtacttgacaaagggatagaagccatgtactttataaatcctttgtggaattttgagacaagtagtcaaaggcgggcgcattatctttggcgcaccaaattcactcagttcaaattcaatacccagcccttattgggaccaagacccctatgcatgtagagtagattgtagcgccttcataacactagtttacctagaaggtatatccctcttcccataccgtagctatgccctacatgccatcacattgagttaactagataaatctagaagtggcgacatgttttgtctcataaaggacatatttcctgattgagactccttaaggtttgattccttcaaccacttccattatatcaccaaaagctctttctaggctctttgaaacttgcatatatccaatttgcaatgagtgttaggtcatctcggtcgctattagagcaaattcctgccaaaatcgccaaacgatagagaagtctagtacaaagaggcccacgtcttcttgttgctagcaattagtcatggcacacttgatcacgcacagagcaatcatatgcctgatctttcctctcgatcaggtcacccctaatcaggagccatatactatacatgccaaagagactgtggtgagctaccttatctacggattccttgcctagacgagatccctgacgcaaacaatcgcagttctagccaagtgaaggctgtccagcatagatcgggtacctgcacgatattgtgtgactcttgacatactctcccggtgtgaaaagatgatcgacggaaaagtgtccgaatagatacctagcttccaaggcatttcagaatttgccactataccaccaagaaagctaaaggtgatatgctacgggacatggttgctatagacaagtgtgttcttcgcctgaaaacagcttacctgcggatccgttcccgtcgctccacatccccactggagctcgaagaagtctcaagtctgttgcaactatttagtatagctttgttcaaaaacagactgaaataggaagaaaaaagaaatccacttaaaatctcaagaaaaaaaccgcaaaatgacaaagcgttgaggggttgatgtcacatgttgagaaccccccgctaggtttccttgatctggaactctccccatcttctctccacctctccagctctccgcaccagacatgtcttctaccattgacagctcaaatattcccactgatggcacaggtaaactcaaaattactagagctttcattacagttctcattctaacaaaaaaaaaataggtgttatccaactggatccttggttggaaccgtaccgtgatgtcttgaaacacagataccaggtggtcgaggaatggaccaagaccatcaatgaaacagagggcagcttggacaagttcagcaaggtgaattcatctccattgatcgatgtcctctgtgctaatgagtttatcagggctacgaaaccttcggactgcatgcacaacccaacggagagatcaaataccaagaatgggcacccaacgccaaggaggcttctttagtcggtgattttagtacgttgtgtgctagccatatttgaggagcttgactgagactggcagacaactgggacgtcaatgccaaccccatgacgaagaacagcttcggcatctgggatgtaacggtaccagcgaagaatggcgctcccgctattccccacgagagcaagatcaaggtaagaatatctgccccgaatatcagcacggcacccactaagaatccgatagatcacaatggtgctccccagcggcgagcgcatctaccggatccccgcttggatcaagcgcgtggtccaagacctgagcgtatcgcctgcatacgatgccgttttctggaacccgcccgcggatgaggtatacaagttccagtacccgcggcccaagaagccggaggatctacgcatttacgaggcgcacgtcggcatctcgtcgccagagactagggtcgctacatacaaggagtttacgaaaaacatgctgccccgcattcagtatctgggatacaatgcaatccagctaatggccatcatggagcatgcgtactatgctagcttcgggtaccaggtaaacaacttcttcgcggcgagcagtcgctacggatccccagaggatctgaaggagcttgttgataccgcacacgagatggggctgattgtgcttcttgatgtggttcatagccatgcctccaaaaacgtcgttgatggactcaatgagttcgatggaaccgatcacctctacttccatggcggcgcgaagggccgtcatgagctgtgggacagtcgtctgttcaattatggaagccacgaagtgttgcgtttccttttgagtaatctgcgtttctggatggaagagtatcaattcgatggataccgcttcgatggtgtgaccagcatgctctatacgcaccatggtatcggaacgtatgttcattttcctactatttctttagaaagtcccgctaaccgaaagaaacagtggattttctggtgggtaccatgagtacttcgggccaggcgttgacgaggagggcgtcacatacctcaccctcgccaaccagatgctgcacgaactctacccagactgtatcacagtcgcagaagatgtctccggcatgcccgcactgtgtctacctcatgcactaggcggtgctggcttcgactaccgtctcgcgatggctatcccagacatgtggatcaagcttctgaaggaaagcactgacgacgaatgggacatggccaacatcgccttcacgctcaccaaccggcgccatggtgagaaaaccattgcctacgccgagagccatgaccaagcgtaagttcaatcccccatctccaaattccaattatccaaccaactaacacacactcgcagcctcgtcggagacaagacccttatgatgtggctctgcgacaaagagatgtacacacacatgtccacgctaacggagttcacccccgtgatcgagcgcggcatggcgctgcacaagatgatccgcctagtaacccacgctctcggcggcgaaggctacctaaacttcgaaggcaacgaattcggacacccagaatggctggacttccctcgcgccggcaacgacaactctttctggtacgcgcgacgccagctaaatctcaccgaagaccctctgctgcggtacaacttcctgaaccagttcgaccgcgggatgcagctggccgagaagaagtacaagtggctctcttcgccgcaggcatacatcagtctgaagaacgagagtgacaaggtccttgtcttcgagcgggctggactactttggatcttcaatttcaattccaagaagagcttcaccgattaccgcgttggcattcaggttcccggtacataccggattattcttgatacggatgatacggcatttggtgggcttgggcggaatgttaaggagacgcgcttcttcactactgatatggagtggaatgggagggcgaatttcgtgcaggtttatattcctacgaggactgctttggtatgtgtctgacccttttcccgtctgtcctttgactggtttgctgacttttctgtgttcctcgcaggtcctggctctggaaaatactctgtaatgtgaacgccaatccatgtctgtgtcctgcacgcagcagagtccgaaattgaacatcttagtcctagtgttagcgtgatttgacctagtttcttcagtgtgatgtcctgcattttgtttctaactacggctatgtgtctagcaacgttttatatcatatacactcttttgaaagcattatacattgtcgcctcaacagacagagcgtgaaggaagatagtggtgcacggtttccgaaggtaataggaagatcaccttcagagaaataagtttcagtgcagaggcaccatataactagacaaaaagcagctagatataaaccacccgaatgatcgagggactacctgtatagggatgaacgcacctatctctaaccattcaactacaccactatacaaaatacgcaggaccaagaaggcaatcacaaaggaaaagatgtcgagaatcaggttttgaactctaaatacacaaaataatgaaacatgccggtctaggggggtgggttgtgtaaggtatctccaatctagaccggctttaaaatcccatcaagtcgctaagatagacgaacgcatcacgaacctctccccaaccaccgacaaaaactcacaacctcttcaacctcaatttccaaaccacgattctgccgtcggtagatcccagacatttcagattcccttgctcgggttcctttcggatcgagtctagacagaacgacaccagggagttccaacattgacgcgacaaccatgcagtggaaatggaagtgaaatcaaatccctttcttgttgcatttgttttctctcttagatcgggtaatgtacactgtggtaatatacacgcctcgaaaaagggaaatgatgttgtcgcgtacaacgttggaacactttgagtgttctgacaaagggaattaaatgaaaccgagagaaccaatagagaataggtgagggaaaagaggaaaagaagaggaagagcttgaaggtggagggggaagttaagacggcgctagctagcaaatgacaaaattacatttaggccttgttctcaagctcagccaggatcttctcacccttggcacgggcagcgttcatgtcgccaaccatgtagaaggcggcctcggggaggtcgtcaccctcaccagcaatgatggccttgaaggaggagatggtgtccttcaagtcaacaagggtaccctcgataccagtgaaaacctgggcgacggcgaagggctgggacaggaaacgctggagcttacgggcacgctcgacagtgagcttatcagcctcggacaactcatccataccgagaatggcaatgatatcctggagggacttgtactcctggagcatctgctggacacggctggcggtgttgtagtggtcgtcaccgatgatacgggggtcgagcatacgggacttggagtcgaggggatcgacagcggggtagatacccaactcggagataccacgagacaacacagtggtggcgtccaagtgagcgaaggtggtagcgggggcaggatcagtcaaatcgtcagcgggcacgtagacggcctggacggaggtgatggaacccttgtgggtggtggtaatacgctcctgcatcatacccatgtcaacagccagggtaggctggtaaccgacggcagaggggatacgacccaaaagggcagacacctcggaaccggcctgggtgaaacggaaaatgttgtcaatgaagagcagcacgtcctgaccctcctcgtcacggaagtactcggcaatggtcaaaccagtcagggcaacacgggcacgggcaccggggggctcgttcatctgaccgaacacaagggcgaccttggagggaccatcgagctggatgacaccggtctcctgcatctcgtggtacagatcgttaccctcacgggtacgctcaccgacaccacagaacacggagtaaccaccgtgggccttggcgatgttgttctaaaaattgcaagtataagcatttaatgcggatttcaagagatgggggatagaggaaatccttacaatcaactcctggatgaacacggtcttaccgacaccggcaccaccgaacagaccaatcttaccaccacgggcgtagggggcgagcaagtcgacaaccttgataccggtgacgagaatctcggcagaggtggactggtcgacgaacgcgggagcatcggcgtggatgggagcgaacttggtggccttgacgggaccacgctcgtcaatggggtcaccagtgacgttgatgatacgaccgagagtggcgggaccgacggggatggtgatgggggcaccagtatcctcggcggtgacaccacgggagagaccctcggtaccttcagatgacgttagtgaaagctccaatttacggttggaccacactcgatcaattcccccgatcgggtagggaacgacacggtggcccaagaaaggggtgggaaggggtgaagcttaccgtccatggcaatagtacggacgacattctcacccaagtgttgctaaaagcaattgttagctttgttgcgatttgaatcaaggttcagccaatcagatcacgtacagcaacctccagaacgagcttctggccgttgttggtggtggtcagggcgttgtaaatggcagggagcttctctccgctgaacttcactgtaagatggcgaatataaagtcagaaacggtttcgttgatgattttggggttgattgcgatggtttcggtgatggattgggtccagggaaaagattttcgcgaggtgcccgttccgtcaggagtcgataacacgtaccgtcaacgacggcaccaatgacctggtgaacctttccagtcaagagagcatcggagctagcgaagcgggcagtgatagccgggagagcattggaacggacaggctggaaagcgcgggcgacgggggtcgtccgggcaaaagcagccctcccaaaggaccgggcgagaccgctagagagattataaaattagtttccaaatgaaaaagacaggaagattcaatggatcctaaaaccatacctcttgaacataatgactgtgttgaagagcgagatgtggtgaaaggaagaggtgaggttggaacgggaaaagagggaagaagaggaagggaagaggttggtggatggggactggtcgcccttagcctttccggggcggttttgccgacgatcccgtgatgaaccgagcaccaacttgagctatctacagggaaaagagcttgattttctgatttagaatggttttttatatataaatcatgctctctcttatttttaaatatccattgccactagtatggtgtggtgaagtggtgaccgaggaagctcagcccgttgccctggaattcgcgcacacacaccgggtcttggcggccgggtgcaggggagccacggcttttggctcaatgacatcgttgccccggagaaatcttcgagatattgaaaacattgtcccttaggctggcggtgaaagggtgaaactagaaaaagatatcacgaaagtcaatggccctttggtccgaatatcggaaaaactctgacgtgtgccaattccgggtcaaaacatcgaacatataaaaacgtatgcactaaattagattccaagctaagattgttatgttcgttatattcagatggtttataatcttcattcctatttatatcctctttgcatttcatatctccatagaaactaacccgtattcttctgttactatcggaaccaccgtgttcccgcagggattctccgcacttgcgttggttccgaatcactccgtagaccacgccatgtcggagcgcaggggcatacacgtagatcgtttatcctagagttacgtccatatcaaactcatgttctatggctacaaaagagatacattgattatagcacagtacgagatacacgcattttccaatgcttgccaaaaaaagatagaatggggaacagtcgacgcgcgcacgggcggaggcccatcctccgatacaaagacatgtcgaacatctatggaaagagtagcttgcaataaaatcgacatccaggtcgtgcgacggatgccgccgtccgtcttgcgtagatatcaagtcactcccggtcgggtaactagaacacctatgacttctcagcggggccgctctggacaaagcccttgccttcgtagccctctttgctgatgccgtggatggggttaatcttctctttctgtagtcgaataggttagcatcgtccaatttgaccgaggcagagacttctcccgactgctgtcggaaggggcgtgagatacataccagggcatattcattggaggcctcctgccactccttggacatggtaccgggctgcttgccggcaaaggagtggacggtgtagaagatggcaacggaggcggcagtgagctggagcaccttgaagaagacgcgcaagccctcacccttgggggcctgggcacgagggccgtgggcgccgaaggcaatgtagtaagctagagcagaggaagaattgatgtcagtgaaaaacgattacttgcaaagataatcatggacgagggatcaggtgcatcccgtcatagataaccgcggaagcctcaggatagtcgaagcaagaggccgtctttcaagccaacacattctaggggtagtacgtaccggccttcttctcctggagggtcaactggtgccagtcgaccttcatacggtcacggagctgcatccagagctcggcctgctcctgagggggcatgccctcccagcgcttctcgatgttggcgagggtagggttggggatagcatggtccgaggcagcgcgggtctgcagggcgttcacagaggcagtcggggcagcacggaaggccgcggtgctgcgagggacagcgcgagagacggtgcgaagaaacattgtgcggcaggcgggaggtgggaggaccacgtcggaatcggtttcaattgatgtaattagacggaggtcgggagttggaaagccagagagcacgcctgggcacggcttaggagtgagtggaggagaatcgtggatggggaatgacttgaagacgtttcttgtggtttgaggtggaaaggcgaggatccggtcgggactagtgcggttttggtttggctgcctcctcattggctcctggcccaaatcggctgtccctgccagtgagcatcatcaccattctcagccatgtggcatgatgttgatattcttcaagtgcttatggacttttttttatttcgacggttattatgcctctattcgcaaggttccccagtgtcaaccagtcgctcaagtctttaggccatcgtcggaatctttagccgcatttaaactagcccagtcatgcagtagctttcgcaggaaaagccaggagttgtccagttgcctaactattctacattcaacaccatgcatcctgagatcttctcgtccgccacgtgcaatataaccgacaggcagcaagattcggtgcccaattgcccaagtacctcaacttgaagtaaaaatcattcagaacggaacaagctgagagtaaatcaagactcctcagacctctcgcaaaatggtacaaacacgggccaagtcgtaacggtcttgcattgcaactaagaagaaaatgggagaacggtgtgcaggaaaggtaatgaattgatcgttccgcggcgccgtcaagggcgcacccatatcagtcgcgcagcccggatccagccggcgctatcatctatgccttgccaccactggcctccttcaggactgtcttccactcgatatcggacttgtcatcggcgtggatggaagtgacgacgttgagggcgttcttgagaacctcgcgggtgctggcgtagatcatggaccactgaaaatgaaattagctattggttctgcacatgggttgaagcctgggtctggggaaatcttacgagagtgggggtctcgctaggcacccaggagatgaagataatcttgcttctgtgagaacaatcaggtcagcgggaggcctgagaacaattgcgaatatcagaatgcgcacctcttgccctcgccggcaatctcgtactcgacatcgtagacggcgtaacggggggaggcgcggccctggctgtctttggcatcggcgagctcgttgcggaagacctcgtagtcctggtccttgccgactgagtctacgacaaccgacttcttgtcgtcggcgatcttgtagatgatgtacttggtcttgccgtggcttcggctgaagtcctggaaggtggtgatacagtcatcctggatctggacactgtagggggcaggtgtcaataaatagtgaaagtgaggggaaaccagttgcgagcgcgggaaccgacgacgacttacccggatgcgagctgcgcgatatcatagtcagtattgagtgttgtatatcataaggttagaggtcaatacgaaccgacatgatggcttatgtagatgagaaagacaaaaaaaggacgggctgtctagcgctatgtcagtggctgagataaccaaactcagggggtctttcgagcttctcggattggcatgagaagtcaaagtagtatgcactccaattacttacagggattgaaggaggcggggatcgagacaacggagacggatgagacggggaagatggagtttgaggggtgaattgtttcccaggtgttgccatggccatagtgggggtggctgcacgtgatatcagacttttgataattaaagtgctcggtacctgtttacaagttgaatgacgtgtaaagaattgatctaatatagtttgtttttaagacttctaaggtatatgaggctgtttggagtttcgacttgaaaaatgacatatagtgtcagatatgttgaagcatcgaacaatatttgtgttctcacgaggtttttgctttttcatcctcgaagtaccaggtactccaaggattatgtacattaagatttataatcacgccatcttagcctatagctgcatatgtacggggtacggagtacataagacgttggatgtgagcctccccaatgtgggtgtctgcgagctaaaattggccagccttcaaccatgggacaacgtcagtggctaattttgccttggcccaccatatctactgtggtttatgcaatacaatatattgacaagctagatttactgcgtctgcctacatattgttcttttattgcttgactacggtgtggatatagcttgacaagtgtgagcgtttaacttcataaccaaaatatatattgtaaatatgcatagcggatctatatattcagacatataattgtcacgcataataacgactgatgtccatcaaggagtttagtgagctgcaggagaattctcttccttcagaaaactgaaatggtctacttcaatgtaggaaatgaatccacaagagagtgatgatattgtaagactagctctgccctcagcggcaaaaaaaaaagagaagagatacaagactcctcccatctgtcgatattgtaaaaagaagagccttgccctcggcgataagaaaaaaaaaaaagagacatatgacccctcccatctgtcgatttttatgcttccactagtagtgcgaggctggtcatcgcaagaaggtcttccacatcggtgcttccgctcggggcaagcccaccacagtcttcaaaatccctgagggtcttatcgattacttctgcctggccgctcatgtgcagaaagtttccgatgcaagcgtgtatttggagaagtctcggatctggaagttcccaacttccgttatgaactttgaaattgacaatccgatccttaggcaaaaaaaagattggccctgtaagggtatccggaaaggtcttgatataatactggtggggaatttcagttgcttcgaaaataagtcggaattgaccaaattccctgtgaatttgggagtctagcatcatgacgttattatctgaattgatctgttccggggcaaatgacatattccgaagaactgggaagtagcgtcttagattgacccaaatcactgcatttctgtgtactatgctgcgggcattggcttaaaaggatccaagtgagaatggaatgatgtgggcggcttcaagatatgttgttaatgtatcttgtggataggggtaggcttgactgtatttatttgttgcaagacatttgtaactatctctttctaaacagtggcgccggagttgcgactgggagtttccattgatgggctcgatatctagacttttgagattttcgattgactcttcgaggtcagggcgcggagacggagtgacttcagtaggtgttttaccaccctgtgatttcaatggaatcaataacccggttttgatgctttgtactagttgccgaagcttttcgtcgtctgaacaccctaaaatgtccaccgccagatttgcttttccgtcaggaggaaggacctcgaggaagtcactgaggaagtccttggttttatctgtgggtttaagtggtttgtagctgttcagctttcgatccgttttctagcttgattgtgagtatcaaagactagaaggcataagagactaaccgtctggaatgatggcattccgcccattatctaggttagggtacgcttgagggtagtctagaaagtatggaagttctagtagaagcaaggtggccgaatcagttgtgacacttgagacggggattgatgattgcggaatgaagcgaaacaattagaatcaacgcggtgaaatgtcatcggctaactttggcagaataatccaaccggcagaataaatatagactaggcttaatctggctagacgatactttctatcagtaaaacccggttgtaacgaattgaatcagacacgggtttgaattcgttatatccaggtcttcgttaaatccagaacccatatatcagatatatatttctagatcacatacagatttatgctccaaaaaggccctgatctttctttgcttcctctactatattttcctcgcttctaccaaccttttatacttatgaaacgtactaattagtcgtgattcaccctactcctgctactctttataaaaatgaaggggtttcaaagcctgaatagccttacgatataggtccttagcctcttctgtaacgatctcatcctggaacgaattcactaaatgtaggaaaggatcctagagattattaaaggagagggtcaatggttatatgctttataaagccattaagcaagctctttactaggtggtaaacagaagggtcgacgttctgggaggttacactgcaacgagtatctgatggactctggccgtcgagatccctaggcgtaagaagagcatggagcagactaagtgatcacataactgcactgtagccaaattcatttctcattcttcgttccataggcaacataaaaaagacagcctaagtatgtagatatgtcaaaccccaaccctaggtacatacatctaaactgtaaccggataactaaaccttcggcgccggcgcaaacttggccctcatcttatccgcaacaagcttctcatcataaatgaagttaacactgtcatgcgcaaccgtcgcctcagcccagcgcttaaacctcggagcctgctctagcaaagcgggcaacttagccgaaacaagaccatgttcaggcttggcgaagctcaaaatcctcaacaagaacgagcccgcctgaacctccgccagggtcagtttctcactaccaccaaagaacggacccttgccctccgtgtctgccaggagtggctcaacctccttcacgacagcagcgaccagctgctcggcggcggcatcgcgctcggtctcatcagcggagcggatactggcaaagaaagaaggcaggactttgctgaagaaggcgtcgacgaagaaagagagacgcgcgcggtagatggcgttctcggttggcgaggacggtgggaggagatggctttggtgcgcatctgcgaggaattgggcgacaatgccggattcggctatgatggttccgttataggagatggtgggaacgaggccgcgctgttggaggtggctgttagtaaacagtttatagtatacgaggcgtagtatgaagtgtaggtgtatagataaggagtgggtgtcggaagagcgcttgtcacttactgggttgatcttcaaataccatggctcgcgcggggtgtttaggtcgatggtgacttcctcatagtcgaggccgagttccttgagggcgatatgcgcgcggtgggcccaggggcagacgcggttcgtgtagagaatgatctttggggcggacatgatggattgatgtgtgatgcacaggaggaatagaacttagaggagtagagcttagagaaggaagttatagtgaggaagacacgccattataaaagacattgcgaaatgaggggttggattagtaaaatgcaattgttaatcaatcgcgaaatcgagggattgactccgttaactccgttcccggataagaattgagcagaggtgggggattcggagagaaatgtctgacaaactcttggggcttaataatggagaaatgattcaccttaattgaggtctagctttgttaaaattggtctaaatatgtacatacattaaagcgtccactatatgtgtccgatatctgaccaaaccaccttcggcggcgctcagttatcagggtatagaaatggtctcaagtggcaaaccgatgtgtagtacgtaaaaagactggagatgtgccctaggagtaaagagcacatctgagtccgatgcgccagcgaccggttccacacgaatcaagtggaagaaagataatgagaaaatgtcaaactaaggaaaagacgagatgaccgtcataaaagggggtatatcgaatacgagtataaaatgagcattgagccgattgttgagatgttcggggaggacggccagccggggcgtaaaaagcactggaagggatcaacacgctgtcgtcaggacgtaattttgcatgaaaactgaaaattgagaaccgtgctcaagcttcctcgtcttcctggccgccatcgatgatcttgtgccagtgctgtggtagacagatacagaccagggggaaagccttgatctcgccggacggcaagggcgacggcatacccgagccactcgagacaccactgtcgcggtgttcgcggtaattcatgccttggtcctcggcacgttcggggagtcgcacacccgtcgcccagccatcgtcccagatgccaatcaccctcaacatctcgcctcggtcaagttcgaattcgtcgcccgctcgtggtgagtatgcccaaaggacggcaaccttgtcgccagcgtgaatctcatcttgagagtagtagtcccggaaataagacagctgctcagatcgaccactggtaactgcttcgggggaagagtatgggttcgtcgggccggagcgaggcgagctgtcgctttctagtccagccagaactgagttgctagagagtgagccgtgacgtttcccggtcaccggtgggattcgcttggacatagctcctggactggcgcccatgccttctgagtctgacgtgtcgctgtacttggccccgccgccgtacatcgccgcggaggtacgcgaataagcgggcgatgattcactgggcatttcgcgcaatgcagacatccgcgtgactcggcctcccgggaccatgttgtacgatgtcgggcttgggggctgctgcattgaaagcgatccgccctttctttgtgggtttggttggttgagcgcagcttcattccgtgtctcacgacggcggcggcgcgtgagaatacaaaaggcgaggagagcacctagaatggcggctcccacgacggagccaactacgatcccagcaattgcgccgcccgacaagccatggctagaatctgcgacggcggaaggtgagggcgtaagagggggtagagtaacagtcggtactgagacaccgtcacagcgactcgtggcattggatttcgtacagcaactatcggtgccattcgcgcaaaatgtgcagagaccaatggtatttgtcgcaaagccacagttgtcaggctcattcgcagctcctttgacacaatctccagaaagggcgtcggatggtttttcgcagatggtcaactcggcatagattaggtccgtgtagtttttgtcgctcgtggcgcataagtctgtatttgccatggtctcctgttcactccgggcccaaagtgcgcatgtgtcgacgcaaattggtatcgagtcgtttgtggaaagtttgcagtcggatatggagctttgcacgacactgctgcacaaaacactggttgtatactgggcatagtagttattgggggcacttgaattgatgccctggcatcccagtaagtcaacatatctgggagctcctgttagtgactcttctcccgatccattggtggcagcacatacttcatcgaaacatatgacccaaggacatagtcctttaatgaattatcgaaatccgtcagattcgacacacctttaaggaaagggctagcagcgcactgtcagcaattgttcttttttttaagcgcgcgtttccactcacaagtccgcatatagactggaactggttgaaatggacgagctatcccaggcaggacaggcacttgaccccgagagggaaatgcaagagctcgacatgccgggcagaatcggcggtctggtctcaaatagacccctttgggttatcgacgcggaatgtgtcaattgcgatcgagaatgttccaggcgttgtcgcgaatcgcacggatattcgaattgggagaattgaataaattgttcgaccccaggtcggaactgtctcgagctcgagaagaagaaaaacgcgtgaaaggtaaacgagtgactcggggttctcaatgcccggaaggaaaggtcaaccgagccccgtaggcctaaatttgaaatgagagaaagagatgacaagacgaagttctaagattggaaagacaaggttagaccttcaagatggtctgggcttgtgggtaacaaggggatgagctgggaaaaagggcaattatgaaacacggagaacaggcataatcggctgtacagattcaggcacgctaaactcaatattggctacactctgtgtactccatggagacgggttggacgcagtatagaagacaattgataaaagggggtgggggggaaaggaagttgtgccgtgttgtttacctttctctttattctgtggactctttttgggtatcaaaacgcaattgggactaaaattctacagacgtacgacatatggtgtactaatactaaacacaatgacaacggttatcttagagtcaactataattggcaatgtctgctgtcaatttctgaccggttgctctgttcatcaccagcctcgctagtgacccgttagcggcttagacaagacgatcactatcgcctcgagaatactatgaccagggtccggagcttaatattaatttcccgaatttcccttgcatcatgcacacaatttggcaatagatgtagcacatttcaacgttgtatgtgagctatcggctgaggatgcgagggaccgaattggacttggtacggaatatggagtacagggtacccaatcacaagcagtaagcagccggcagttgcatgtaccaggtacttacaagcatagtactccgtataacctatgtgttaatcaatccccccgcttgggcagatagttatatgacaagtctgttcctatagacagttagtaaatatacctataccttactttcaagtagagggaagtgtatatcatctaaagtcaggcggagtacaatgtagggcaacgaattacagaggtcatgtgaccattgacatcatctgatctggaggctgccgtcagacaatctgcgactcgtcggtggaaaacctttaaccattgccaacacattcccagtgtactcgataacaactcacactttctatcagatctcagagaccctgcgagccatgtgcagctccgaccttttcctagcggtactcgccgtctttttcccacctattgcaggtaacttttaaacccgcagacccgcacgccaacacacctacacttggtccaatgctaaccaaacccccgcatcaacagtctgggtcaaggccgggttctgcagtgcagactcgttcatcaacataactctcaccctactctgcttcttcccgggtctcatccacgcgtggtacatcatcctcaagtacccggagcaatacgacgacgatgtagcctacgagcccatccccggaggcgggagtcggcggcgcgatctggagaacggaaacgttacctactactacgtctcacgacagccccagcgcggatatggcacagtcgacactcaagaccagcaggcgcctggtccggcgaacaaaccacacaaccagactgaagcaagtggaaatgctgggagcagcagtgcgcccccaccaccgacttatgctgaggctgtgaagggtgacaataagctgcagagcaatgaacgagagtgagcactgactcgttggctttgcttgggtggcgtcctcggcttcccatcgtctcatcggtcacctatttcccgacccggttgtgttgtccataccctttcgcttcactgtttttgtacacgcacttcttgagaactgcatcgttatgttatgactttgacgaaggaacgttctatgtaattctgacttttgattttgttcattgcttgcgtatcttctttgattatatgttatttgcgggatactataccagtactttttatccttacctcggaggcacttagtaccaactgggcttttggtttgataactcctatcttgtaggtattattctcaatcttaatatagatcttcttgatttgagcttctaccacgcattggcaaatcgttagtggatacaatgagatcctgctttagtagccagtgggtgctctcatttcgggaggtggctatcttattgagatgaaggtattgtgaggtatggatgtgtaggaacttctctgggcactcgtatagccactcatattgtatataccccagaatggattggaagattggatcagcgtatcggtcctggaaggctgtccatctctcagtgaaactgtcaaccttctcgcgtaattcctttgctttctgggactttgtgttgcgttgagaagccagggaggcggtgaactgagggcttcttgttgctgagccttagtgagctgttccgatagaatcggccaggcgttcttcatgatgcaaatattgatataccagatacaaagcatgttctttgcctttgcgttcggggactagatggttggtcaaatagaggaccgttgatgatcgagctgacggcatcaaaaacatcagcacttcgtcattgagaagctccggtatgggccagccctgccgatgcgattcgcattgatccttccagccacgctatatttcagattcttacgagctggcgtgtaaccctgggacatagtgattgtgcctgcttcgtagtcgcggaagacagagcgcagttcaaatactttttaggttatcctagctccttcatgtcgtagtgctgcagtagttagtcaacgacctggtcgatttccttttcagtgggtgcagcgatgatcaacgtgtatcatcatgatacctagtcaagtccatgcaattgtcgcctgttttgatttagatataaggatcgcccccgagaggtcggaacccgatgctatccatttctagaggtatacggtgtctcgaagtccaaagacccaaagagtgtctgccttcggcgtcaaaatattcgaaacctgagggttggcgtatatagaccgtctcggtgttgaggtacgcagccgtaaagtcgacttatatccactatagaacgacacagtgataggtatagtggtatgagggatgtgcactgggctaagaatatatgatgtgaagtaagactgaaggggcccaaaataggcttgacgtctcagcgcgaggtcccataagatgatatagatgcctgtcagggtacggctaagaacgagagatgacatgatatataggagtatcaataagcgaagatgtcaaaagaaaaagaaggacgagatactgaatattgatggtaagtaacattgtccagagcacgagatgagtattaaacaaactctagaaagtcgcttgacaaaggatttatgcctttatagccaggtagttcatatttctttggataacgttttacaaactcatgctgattcataccattcctatgtatatttcctccgcatatggtcgaaaatactgatagcttcaggttttagcgactcgggtgttcatattgacgccaaggtcaactatgcaggacattatgatcataaggcgtatattggaaagacggactgctgttatggttaacgatgggctcgatatgggtttagacttgataaagcctcgaggaaaagggatcgtcggtgcaatggattgacgaggtaggcaatcggagctatggatgtctctcggtagaggggtaaccctgtaaagcccgtttcactaattaatcggaacattaaatgcgattggccaactatatagtacataattaaaacattccaaggctgtattcatagaaaattgctacaatgacctacagcaatctgataagcctatccgaggccaagttccgtcccgaattgatcctcacctagacactctttacaccaccaccacttcctgccacaagcctgtggcctttgttttggccatgcagtctatgccacagctgcttaggcaatcactccgatcaagtctccgactcacaagcccctccccagtgcgagcgcacttccgacctgcattctccgtcagaccgactccgcggagcttctccgcctgtgtacaatgccaattccgccggcagccgagcacatatttggccctcaatgaccgagagaagttctccgcggatacagagaggttaatcagggaaaaagagaaagaactagccgagctggagctcgcctcgcgcgaccctgtcccgatcccgggtctggagtcgggcagctcacttgattcagtacctcctgcggaggacgaacagagtgccgcacaatcgaaaccacaaacaaaggagcatgaaaaagagaagtcagtttcacaggaagaagatgccagtgttggcacgaggagtggaggcctgccatcgtatctggaaagccgtcggtcaaaatggtccaagcaattcagcacagtgatggacaatttgcaatccaatgtttttgtagcaggtcagcgtttaaatgacctgactggatactccagcatcgaagcattgaaaaaagatatccagttctatggtatgtaccatagcaatgcccgaacccgaccccgcgaaacctaagactaatcccacgaaatcatgcagagaaccgactccgcactgcccgagcgaatgtcaagcaagcgaaagaagactacgccgcagcgattaatcgccgatcgacttcccaacgcgaagtaaacgagctcctccaacgcaagcacgcctggtcctcaacagacctggagcgattcaccctcctctaccgcaatgatcacacgaacgaggtcgccgagaccgagacctcccacgctctatcggccgcagagcgcgaagctgaagaggctgccgcacaaatgagcaagagcatcctctcgcgataccacgaggagcaagtctggtccgacaagatccgccgcatgtcgacatggggaacttggggtttgatgggcatgaacgtcctattattccttattttccagatcctcgtggagccgtggcgtcgcaagcgactcgtccagggtttcgaggataaggtcgttgaagcgttggagaaggagaaggccctgaaccgggctatgtttaccgagaacgctgtttcgatcacgccgcggtcgaatgtcactatcctccccgaaattattgattctaccgacgagaacataattgagactgctccttctcttttgattgaaccgaagattaccacgacggagaaagatgcgtccactacggggtccattgtctcggtgaccgacgctactgccgcccagtctctcaagacccgtctctcgaacattacgttgccggttctgtcagtcgagtactggaggcaggtggctagcgagttcttcagtgatcgcagcattgctgtctcccaatacgatctcaccgccgtggctcttcagagtgccgcagctggtgcagctgtgacgggcctactgttcgccctgatcggatctcggtgaaaaaatcatttcattcgggcatgttataattgcattaccagcgagagcgcaccatgtttcgctcatgtttggtcttggcattttgataatgacttggcattttgttgggtggttatatacttgtacatacaattgagaaaaatagataaacagttggatataacccgggaattgaatttagtgtataactactatttgagaattctggcctggaaagcgaccatatatcaaaatagcgaagcattgacgttatttgttgctttcataagagaaccaagcaagcgttgaacaaaggaaataacatgactaggtgatacactaaataaagaacatatgtactcaaggagaccatcggacatcctctgaactcccgagctcgtgtgtttgccatggagaaagatcaagatccaggaagatacggacaaaggaaggaagaggctcattttttgtccatattaaaacacaggtctcttaatcttgacaagacacacggccgctctgtctaaaaaagggaagaaaacacacacacacacacacaagcacatacacagatagataggacatacaatccgtccatcttatatcatccacacttttaatgagactcgcccgttggcggcgatcaaaaaagggtgtattcaaaaattcgcctatccgataatcagggtctcatcctcggggaagctgtaggtgggaacctccaagttcagaggggcagggcccctccgaatacggccggagatatcgtagtgggaaccgtggcaggggcagaaccagccgccgtagtcaccggcctcgccgatggggacacaacccaagtgggtgcagacacctgtagggaggaaggaaagttagaaagttgcgggttgttgttcgccaatcccatgttcacttaccgagcatgacgagccactcgggacgctggacgcggtcctcatcgggctgggggtcacggagagtctcccaattggttgaacgggcctcatcgatctcggcctgggtgcggtgacggatgaagacgggcttaccacgccacttgatgatgacctgttggaatggatgttagatagggatcctgggtaatgggatctgtcggatgaggtggtgaatagaaacacgtacgttcttgccctcagggatggcaccgagagagatctcgaccttagcctgggccaggacatcggcggaggcggacatgttgaccaggaaatctggagagaaagaataacatcagtcgtttgttcaaagtcgcccaaatttccccaattattcaagaatattgttcaattactgtattccatgccatctctttctgattcgaagattccacaaaaacctaccctgaacagtagccttggcaccgacagcggtcgccagaccgagggtgccggccatgaagtaggaaaagacctggttggtgcggggcgagttgttggacttgtacttgctgaagttggggatcttcagggtcgagccgggttcgttagcactggcgaagggggattcgaaagacgacttcgaatcggcgactcccctccgctgctggcaggaggtaacggcggcgcgggagatgggtagctgctgccgagcgacggtgcgcagcagagtgctggaagcggaggagagcgacattgtgagggcaattgaccacggaggggaattgtgccgcgagttgtggagagcgaggtgaggatagagggtggatgaagtcggaagttgaagttggagccagagctttcgctagcgatcggaatcacggggcctgtcattggctgaccggttcccgttcactcccttgacaagaaaacattctacaacttctatactacttgaattcatatctaatgtattctgtgaattgatattgattaattattcatgtttctgctgaaatttgactcgtcaattgtatattatcacattttcttttgttatatctaacccgacccaatgcgaccaaaaccaatgcgcagggaaacccatcattagaaaactccaatgcaaacaacaagattcaagaaaaaaggataatgtagcgcaatcaatcttgcatttccacatcctggtcatgggttgccatgggctcgactgtccggtccgcaatcaacgcactcacagggaccataggccgagaaaccgacggagatgatgtctttgaatcttctttttgtggggtggcatctcccatcactgtgccatttgctggtgtcggaggtgcaattgtaccgttgagagtacgctggcccttctctatggcgccttgattcgccgcatccttcgccttcttctccttgaattgtttgtaagtcgtagtcttgggaatcacgtcggaaaggaactctagattgtcggtgtgtgataccgccgaagctattgtacgttagcatgctgtccgacctcttgctaaccgaggcataggcgtaaccaaccgagatctttatactggacggtcttgcgtggttttcgctccgatttgaccacgttgtgcccttgctcggcaagatattggatgaacatctcctagatctagcattagtcggtgttctcgaggtatttaggtagagggcgcggcatacggtagccattgcgatgacgaaggtcgcgttgttcgagcattgcacgatatcctcatccaactgaatgatcttcttaattcgagcaactatagaaatgtgttggtatgtcaatccaaagtaatagttgtgtctgggacttactcggaagtgcactctgtccggtgatctcatccggctctcccacagtctttggagccatgatgattgattctggcgagataaagtattggcaggacaaatttatacaatttgcagcatgctccagtcaaatattcccgttgtgaaagcaagtgagcgcgagcgtggagtcgagaagagtgaaacgcgtggccgcgttatctaaggaggctctccgttatcgattcaagtgtacttggcgacttcgctttgtcacatcatctactttcaagagcttcattcaccctcgtcccctgaattgtcgcctatagcgcgttaaagtagcaccctagagggatcggacttcgaattcgagagttcctcttctcacatcaaagagcgcggcgtccatcggggacatagacagatcatcgagtcaactctaaatcgactatgctgaccctacctcctcgaccaatgttatgacctctacacgcccctccacgacctttaataggtccctttcagtttcaagagagcggcgcagcccgcgaatgccacccagtcgttctgttccctcccccgtcgaccgacgaggcgattccgacaaccaggaagcacccgccatcccagaagagattagtgggatcaagcgatatgaagattttaccacaatagactgggtccaagatgcagtctatgagcagtcacggcgacgcgcgaaacggcgcagtggcactggattctgggatcaggaaggcatccttggctggagacggaaaatgtacgagtcatacgatgcaggccaggcatggcttgttgttacgcttgtgggcttggcaatcggattaaactcggctgtgctcaatatcatcacggaatggctctctgatattaagctgggccattgtactaccgcattctaccttaatgagtctttctgctgctggggtgccgagaatggtatgttcgggaggttctacagcgcttcttgtaaactaactttttccataataggctgccccgagtggaagaattggacttcgtggtggctgttaaattatgttttctatttctttggcgcggtaagacgtgtgcccggctagtactcgagaaactatgaactcataggctaattcggaagacagttggtactttcatctatcgctggagtcctggtcaaatcatttgcgccgtacgctgcaggctctggtatctcagagatcaaatgcattattgccggcttcgtcatgaagggcttcctaggggcatggactctcctaatcaagtcaattgcccttccactagctattgcgtcgggcttgtctgttggaaaagaggggcctagcgtgcattttgctgtgtgtaccggaaacgtgatatcacgatttttcggcaaatacaaacaaaatgcatcgaaaacgagagaaatcttgactgcctcagcggcagctggcgtggctgtcgcctttggcagtccaattggaggcgtgcttttctccctggaggtgagttcaatcgtgcactagttgataggacgtaagctgacagtcaataggaaatggcaaactattttcccctcaagactctttggcgcagctatttctgtgccttggtggcaaccagtgtgctagcggtacgtttcccatattgccaattgagtctggaccacacctgatccattctaggctgtcaatcctttccggactggtcaattggtcatgttccaagtggaatatgatcgcacatggcactttttcgagttcatcttctttattggtcttggcgtcttcggtggactttacggtgcatttgtaatgaaatggaaccttcgaatggccgcgttccgcaagaaatacctctcacagtggcctataaccgagtcggttgttctcgcgggacttactgcagtactgtgctaccccaacatgtttctgaagatcaacatgaccgcaatgatggagatcttattccgcgaatgcgagggtggccatgactatcatggactatgcgagtatgattattcgcctccatatgcatgaaagaacaccactaactcattgcaggtccaagaacagatggtcgatggtcttctcgctagctattgcgactgtccttcgcactgtgttagttattatttcctacgggtgcaaggtgccagccggtatcttcgtgccttcgatggctgtgggggcttcattcggccgcatgattggaatcatggtacaggcattacatgaatcatttccccaatcggcattcttcgcctcgtgtgatccagatgtcccttgtattacaccgggaacatatgcgttcctgggagccggggcagccctcagtggaatcatgcatttgaccatttctgtaacggtcatcatgttcgagttgactggtgcactaacctacattctaccgaccatggtaagtcttcattctaaattgcattacctcattcaaccatcctgactgtccttttacagattgtggtaggcgtcaccaaagccgttggcgatcgattcggcagtggcggtatcgccgatcgaatgatatggttcaacgggttcccattcctagacaacaaggaggaccacgtcttcaacgtacccgtatctcatgcaatgaccacaggcccgctctcggtaccagcatcggatttccccgtccgcgaagcagagcatctcctaaacgacaacaaattccaaggcttccctgtcgtggaggaccgcacttccaaaaccctagttggatacatcggccgaaccgaactccgatacgcgatcgaccgcgcccgcaaccagggaatggttgcgccaaatgcccggtgcgtgttcaccaaagatgcagccgaggcagccgttgcacgcagggcgtccgtctcgcaccactctcggtcatcagatacattcgatgcaattcagaggagtgtgggggcttctttcgtggatttctcgcgatatgtcgaccacacgccactgaccgttcacccgcgccatcctctcgaaacggtcatggagattttcaagaagatgggcccgcgagtcattctcgtcgagcaccgcggcaaactaatcggcttggtcaccgtcaaggactgcttgaagtatcaattcaaggtcgaagccgaggaacatacactggccgcaacgagttcttctcaatatagtgcgcttggtgggcagctgaacaaccctgcccctgaaacactggaagatcgcttgtggcggctcatccagactgccgctgcgtttgtgtctggtaagatctctcgccggccggtccgaccgcgtgaccgcacgatgcctaggcaaccggagcattcggatattctcgaagggagggatgatgacgcggtggtagaattggaggacagagaagaccggccgatgatatgaaatgcgggatcgctatgttgccacgtttatacgttacattgatagagagttatttgctacatacggaacgttgcttgctcatctatttcccataattgcaagctcttatgtgtttaagccaacggaggcaagaactggaatttcccatattcgcctaatataatctacacttgcctcaactaaattctctgatacgaaggttatcaggacttaggattgttcatctcggggccttggcaaacgagtttcatcccccaaacctgctaaaagatctcgtgaccagccaccgtccagtcctccgaccacaacataccgacctcattacacctatagccaccaagctgtctaaataccatctcccgggagtaacatatctggccggtaatgtagcttcaagttcagcttcagtcgcatccctcgccaattccttcatttacatggattgttacatggatcttggcatttatatgcctaatgcagtatgtggggtaaccctatggtataaatgcatttttattggtgcataattaacgagctagccattttgggacttgtgcataaaaccctatcacccatactccgtaactactccttggtcatatgacacacacctaagagtgatttaatattgctccgcttcgcttcaattattcaatcttgaccgggtctacgatgaatattcccagacaatgaaaccatctcaacaaccccgcactattcagacggagttacagcacgaacgctatgggcaatttcctggacgttggattgagcagcccttttaaaggctaagtaaggttgataggggaagcaagatatcctgggtctggataattcgatgagccccgtgtatgtacatattctttctcaatatcattatttagttcatcgtctttcctcttcccttcctcttgtttttttccgagcgagtcctgtcgatatatacaatacagtcttattctctctcctagttgccttcaaggcttttcatatcatggtcagtttgcatgcactatcgctttcgtagactcatcatccgtatcacttccttgtctccttgtgaaacgtgagagcggaatgctattactttgatagcggcgtgaagtactttcaattcgactacctggatgatagcctcggcgactggctgactgtgagccgccagagctgcttggaaatagccttggaaacagcttattcatgatcggattggttgccgggatgctagcagcgatgatagcgacagctatctcgattcccgaagaaatagagatcccaaaggtgtcccaggaggggtctgagctttggtataatttcacaatgtagactatccgcacaatgctggctatacacgcacttttatctagttagcactaatgcatatcaaattaaatcacgccctggacatacaacgaccctagtgatagcaaagcagcgacggcaaatttcttgctagttttgagatgaagacctgaaattgattagagtaataactagagcgaatcggtgaccacaaacctagaactgttctcagtggcaagagaagaatccaaatatccgtcaccagagaaagcgcggcacccgcataccaaaatgggatagatgcaaagcaggtatgatgttcatatttctgttcatcgaagacggcattgaccggggtacactggaatatcgttgcgaggataatggcgacgctcatggccgtgacgagtgcgatggttccaaggcagattactcggatgttagggaatacgcgtaggtatagcagacagattgatactttgatcagaccgctgattaaggtataaataatgtgagtcacgtatcgaatctatattgttgagactggttagcctcttctttccaattgcgttatgacagttatcattctgcccataccttcgccgaaggtagcacatctgctttaacgagatcccatttatgctttcctgttccatacctgactcctactcacatataagagacgaattaaccatataagaagtagaaggcgtaccaagtcccgcaaccaccacgttcacaattgccagaaccgtcgcagtcaccattatccagtcgtctaggccaaacattttcacgatgaagatcctcgaaattgtacgaaggcctacaatgagtgccgcgaggcccgtcaccgtgccgttgatgatcagcaatataggcccacggttctcaacctaaagagacagttagagaaagctctgggagactgctcttcctctgagcctttacttacatcagatcgcgtctgaaagagcgtctccataatatgttgatgtccttgaaaagaggacgggtcttaggccccatatgaactaatttttatccccgggatccttcgaggtatgcattggccttttgcacccatggatctagggcttattctttcgggcataaatcatacttccgggtggcccccaaacactaatttaatctaatcacagagaccggctgtcgtaatctccgcccgtcttgctttcgcttaaggattgagctagttactactaggaaaggctctaacatatttcacatgcgagcatcaagttgtaatttaccgcatttactatgtgtgcttgcgtggccggcttgcatgcggatgtcgaggcatagatccggcgttttatcccggtggataagcagactgcagggagcgaatgccagtgtgaagcgcttggacaaaggcgctaacctcggtgttatcaccagttatgttctacaggatctgctagtacggagtagtagtaatgaacgatccacctttatcaccttggcactttaaaaagaaattacaccttccgattgcttgggctaggcaataaaagggatgttataatccttgtagaaaattaatctactctgaatagccttttttggtttcactttgtttacaatacacacacttctcgacgttcaatgatcctgatgccttctcttttgcagaacctcctgctaacaattcccctggcatgtctagctagcagccatgccatcagtgattcccttggctcgaactataagatcgatgttcattcccatgtcgttccgtcgatttggaaggaggaattgatctctgcaggctacccagtcaagaatggtactttgtatacagatggcttccctgtcccagattggacattggatgcacacattagcaccatggacagccttggagttaattattcgacaatcagtgtcagcgcccctggcgtcttcttcctaaaagatgccaaaaaggccaaatccttggctcgcagcgtcaacctcctgcttcataagtattctcgaactcatccgactcgacttggagccctctgccttctccctctcccttacgtcggcgaggcggtcgaggagttgaaggtacccttcttttcttcccctagtagattatctggtcaaatctaacttggaattcgtagttttgcctggatacgctcgggtttgttggcgtggggctgtacaccaacgccaatgggacgtatttgggtgacaaagcccttgaccctgttttctcggccttgcacaaacgcaatgccagcgtgtttgttcacccagcttctccagactgcacatccgtcgcccaaggctggcccatcccgatgaccgagtatcctttcgacaccgtgcgtgccattgagaacctgctgctgactggtcaacgtgcacaatatccggatatcaagatgatctttgcccacggtggtggtgcaatcccattcttggccacccgaatcgccggcatggcctccctttcctggttgggtgggctgtcggtcgttgaatccctggcgcaactcgccggatattattttgataccgcttcctcgacttctgctattcagttgacggctttgaagagctttgttggcgtggatcagattgtgactggaactgactgtaagtgggcagtgccagtaacagccccgaaacagctgcagtatactaacacatacagatccgtatgttcctgtctcccaggcaacgtcgggattagccgcgattgagggtaatggtaactttaccgcggtggagatgagtcagatcgatactctgaatgccttgacgatctttccgcggatcatcaaagctttgaagctcagttgagatgtatattaggcattgcttgtagattattaacatagaacagcttttttaatcaccgcattcgcagttaacactattcttatataattcatttcgtttttttgtgtcttccggtgtctatcaagtactcatgcaaagtgcaggagagctgtcttgattatgcatcaggcttagatgcctaaaagaactccttttaccgaagtgcacccagccaagggtgtcgcaagaggtcctcagcggaaattcgatcagtgggattgattttcatcatcgcgtgcaaaaaggagacgaactcatccctgacgccttggtcgagacctggcaggaatgcttccgacgccagccccggccggttcattggcagcgagttcttgatccggccattatcatcaaatatgtcctgaacaatgtccttgtttcctctccctaaaagctccttaggaaatggcccgaatagatccacaatctctcgtaagtgttccttgagctcataatggccgtctggcggggccgatccgctgaacatgcgaactgcccggaagacctcgaatacgacacacccgaggttccaccagtcggtgctcgcgtcccacggggcctgtattagaacttcgggagatcgaagcgctacaggctgtataatctcgctgagatgtcggtcttcccagctggagacgccccagtctccaagggcaatatcaaattcagcaacgcgcgtattgtcagtttcgttgaagtaatagcggcgtaaggggattgaggggatgactgagtactgttcctcggaccgattctgtttgggaatggcgacctcggccagataaccagattctataagggaaaaatccctaaacttgacgaaaatgttatccggttttatatctgatcgtagacaagaaatattagcatgtcatatatcataatgaccaaggacgaaagagcatatcatacctgtatgaataacatgatgttcgtgagcaaaatcaagcgccagtaggagttggatggtgaacctgcgcatcaccgagttcggaagtctactttcaatgaaccaagcgccgaagctccgtagcgtctcgcccatcagctcaaaaaccaagcagacgtgagttccattaggtccgtggtgctcaaagtcatctagcagatggcagacgtggttgtagcccagctgattgcggtccccgttctggagatgagtcaagatcttccgttcgaaaatgggggcttgcgtgccatcataacactcggcgctgagcaccttcagagctcggaactcattttcaatgccaggtctgtttgcgtgtgttatctctatttattccctttttctaaaaagattctactcactgtaccggctgtaggtctctgacaagccagactgtcgaatagacaccatatccaatcttattcaggaccttgtaccggtctttaaagacatcattgatataaacagggtgaaatcctcccggtcggtacacctgcgtgccttcctcgatattgtcgttggtattgtcgggcatctcggagaatagaacgacgtccgtaatgaaggtgagagttgaaaagctgaagctcagcaggagtcacagttgcagcggcagacagtagtgaaaatatgcaaatagacttggctacgcctcttatccctagatgtcttctcaagggggtcgattcagttcgtccaaataagactggcgtggtttctgggcggtaaagtcagcccaacgaacgttcatgaggtcaagactcaagtactactgaaaatgcgcaggtccatattcctttatatatttgtttgacacaatccacttctatattattgcactaaagtcgtgagccaattgtcaacgttgattagtcttccaagtccaaagggggttctgtacggagtagctggtacagtaagtcagccctagagccctatgtatatagttaggtctgagcgtgcatgtattgaatggtacccttgcaatggattactactttgtaattatgaaattgaaattgtaaaatggtctaatctattcactcctacggagtccgtcggttgaaaaggactaaatgcagtccgaattaaaatgcattcctgcgatagataatgcagattgtaagcatagaaaaggcgtagcggtgtcaaactggatcgacaactctaaagctatttcgatagacacaatgccccagatagaccaaaatgacgaaaatcaagcccactcggtgaactagatccccgattaggctatatgcaatcaaagttatgataaatagaacttacaggttaggaatcctaatcaccatccagcagaagactttacgatgatgcattcccaagcacatcgcacagaattacccaggatcagtatcggacgagacagcgtctctcaacaatcgcgctcccggagccaggtgacacgacgtgcctatatatccagcagtcttagcacagatcaaatacgagtaaaaccgcccaaatatgtagctagtcaaaaataattataagcggaagaaaatccacgaatacgaacaagcaacatctttatttgtgtgcagcactgctggccaacttttgcatccccagatcaaacagatggctggtacggagtagataatgatacctatgtacaaggctgggcctcgtgccccgcagcatacgatgaaatagatatatgtatatgtcttgttcactcccacctctataattgaatagtaaatcttttcgcaagttttcctcttcggccgtttgacatccaatccttctaacccgtatatgttatacaactctcctgagtcatgctcacaagcgctaatgatgtcgaatacacgaatcctatcaaacggaccgactcagtggaccaagcagtgattgcatacagcaagacggacactagagatatagcctccgcaagagtgaactgtactccgagacctgagctcgtgacccccctttctctccccctctcagctcacaacttacattcgaaaagaggagaaaacacttggcacactggtggtacagaccccaacgcaccggaacacgttacggtcgtctacgaagattctaatggacagcatgtcaccgttaaacatgttggtagaaatggaaaggctgtttagatcacgagaacttccatgctagttgatatcctgtgattatatgagaaagaagttatcggtacgcgggtacctacaagatttgattacaaacataaagcacttccgaggatatcctctttaccgaagtgttgtcaatgacttcggcgtatggcttctgagcaagtagtcaaggctagcatgataaactagcaaacaactcgtcgagatcgaaaatttccttgcgagtttcttgaatttttactgccgtatgtagtcttgcttggggatgcacttcttctctcggtatatagcctgttaaatcagtcagcatccctagccaagtttactttaatggatattgtcaaccacttacccatataccctagggcttgggccacgcccgactctgaatccgtcttcttcgcttccacaatgataacatttaaagcaacctcctcattttcaccgtaccagactccgtagtctgtccgtgccgagagcattaccaaatttccctagggcagctctgcaagggcagccactctctgtaaaacctttggtaaagccggacccgagtagctgaagcccgtatgctccgttttaacaaagcaaaattggaacggacgatatagtctcttgtctagcgaaatttccgcgagggagtattctggaattttcctaaagttcaaaaacccattcgcttcaagtacactatgcagaatcacactgtcaagctggtacgagcctccacccaactcgcggagaatggaccgccagcccccaagctccagttgtacaaaagaaaatgtcacatggcgaatagaatcttgaatactgtaaagaaagatgcccaaagcagccgaagattcgaatgacattcgcgagaaagtcaattcttgcagttctggcaagcacccagccgacgaaagctgggagagaaggaaagttgattcgcacttccagttgaaaataatcgtcagctttctgagagatttggcacattggatcattttcgccatccaatgtatagtcttggtctcggcatcggggattgcaaagcacagttccttgaggtgggaaaaggccgggataccaaaagtggcaatatcaaattgtgttagcttatcctgaaacactctggttctgcttttcacaatgctgattgagaaatattccatcggaatttgctcattagcgatggctttgagaacaagaccagtggcttcgtcaagcgtgatgccatggctgtacgcgtacggtgttgtataacttaaattgtgcagctcgaaagaccggcagttggacaggcgttttatcacatcgcaccacgcttgaatatagatcctttttgatgtggcatcaggggataatggtcctaggtagccctttgaatccctgacgatctctagcttgcggacacagggacaaaacatctcgtcattggctgcttcctcgacccggacaagtgaatttggtgaaagatcggtcctcaatgtgtgtacaaaagtgtgtgcaaactggcgaaggctgctctgataaatcgctcggcaggtaagtcgaagagcgcatagatcaagagactcggtaaacttgacaatttccgccaccagttcaactgggagagtatggagacctgacttgcgtgctatgttggttctcatactgatccgtggagtaggggacttgataagaaaagaaggaagagagttgagatgagatacagttgaataaaagagaatagtgagttggaagagaaggaaaaggaggataattgaagctccggtcttgtttaagggactggatagtttctcgataacggcatagaatgcggtcatcaaggccgctcccgttttggtatatagggcatcatcacaggtatatatagcttcattaccaaattatgacaaaggcggacaatggaaaaagagggcagaatagaagatgtaatttggggttatatcaagccatatataggaataaagacctgcattatcagacagatgtgcaggcaaacatataaaacaagctagatgaacatagccctttccctcttatgatttgatgccgacatggtaatacaaagtgatgaaaggaaattgaacagtcttttgtccactgtggaaggtccagttggtgagatcaagatctggctgatctagcagttgccaggtttcctttgtggtgcgagttcggaggcaggatataaacccatcaacgaagatagtcagaggcgctacgggcagaataaatgtgaaaaagagatggactggcgaatcccagtaccaaataagagttacaaagaaagtccaaaagaagaccaaaggcgaacatagacaagtccaaagatcgcgtgacgtgatttcgaatatgctgaaggggatcggattagcttatataacaagtggttttaatagattgatgacttgcataaacgaatcggcggtctcaattgcgctcttcagtattcctgctgcatcttcgtctccgaagtgatggaaacaaatgttgaagatccgacactcctttttcgaactttctgcaaatcgaggaacagctcgagcatccaccgcactctcgatataagtgacattctgctgcttcttcgagattcgctcccactcttcaatatgggggtaaagatcgctcaacacaaaatgaacagggcccttaccctcggattcgagctctttattaagctccgattccaggactggggtaggcccaccggcaccggcacatatgtccaaaactgtgtaagaggaaagatctttaagatgctctttgaacactacacatgcctgtttcgcaagatttccatggctccacccgggagctcgaagattccacagttgggtgagaaccagttgctcgtgccgatgaagccacgatgggcaccaatcttggtcgccgatctctagaagatgtgaccgaggccaggagaatagttgcattatgtgtgcttctagatattggtgagaaaagttgtctgaactgagataggccgctgacagggaaatcgctcagtcacgtgccggcccaccgactcttggggacaccttcaagaaataaaacacaatgacaacaaaatatactaagttgatcgcttgtgtctttgaaaagtcgtgtcgtcttggatattacgtgtggttgtatccggggcgaccttgggatgtttcaatccacaaccccttcacaaaatatgtaacttctattcggtcttataacaatgcaaccaacccatcttgtcacccatgaactaaacctaaagtcctatacatccgtggatatatttctgcacactaactgcatggtggtctcggaatttgcactagtcctaattcggacctgacgcagttcagggaacatcactttgacaccaacggagaacatgaaggtcgttattgtcggcggaggtctaggtggcctagcatgtgcaattgcctgtcgccgtgagggaatcgacgtggaaatcctcgagcggtcccccgaagtccacgaagttggagcaggaatccaaatcccaccaaatggcggtagaataatgtgcgactttggcctgcttccccaactactggagcaaggaagtcaggtgcaacaagtggattttcggaggtacaaagatggtcgtcttctgcgatcaatgccatttggggacgatatcacggaggagttcggggcgccgtggatgtacgtggttgattgccttggcgcgacattgtcagactcttaccctttgcagaattattcatcgggtggactatcatcgcattcttcttgatgaggcaatccgactcggtgcggtccttcaactgggggcagaagtagagaatatttacaccgagcagccagccgttcttcttgctggcgggagacgcatatcggcagatattgtgattggtgctgacggtacgtttatagatcttttgtcgaatatatatttaaccatctctactgacaaggaaaggtcaaatgtctacggtccgaagggctattcttgaatctcctcattctccagtccccacgggcgacatggcctatcgagcaaccttttcacgagagcagctggagtctttgggtgatgaaagagtaaacaaactgtgtcagaaaattgccgtcacaagctggttgggaccggagaagcatacgattttctatcctctccgtggtggaaatgagttcaaccttgttctcgtgcggcccgataccttatcattgggttcgcgcagagagcagggagatattgaggagatgcgagagagctacgcaaactgggatgaaacgtaaggacccttggaatagtcgactgcaatttcctaatatgcttctcgctttttagattacaaaagctggtttcgtgtgtgccatcggtatataaatggaaattgacacacctctccgagcttgaatcgtggaccaaggtcggtacaatactatgtccttccaatcacgaacttgctaactaggacttactagggatctgttgccttgcttggtgatgcctgccaccccactctgccatatcaagcacaaggggctgcaatggctgtcgaagacggagcagtcattggcaagcttcttggcctattgcaggtccattatctggatcctagaaattccggaagcgatccctcaatatccacgcgatcttcagctcaagatctcacagctgctgtgcttactctctacgagaaatgccgaaaagcacgcacagcccgaaatgttcaaggagcaatcatgaatcggaagctttttcacatcccagatggctttttgcaaatgatccgggatttcctgttgggatatgcaggagttacccggaagagcgattggacatggctgtcttcatttcggcaggggcaaacccttggtctagatgtgctggaggattgccaaaaggcctttgaggagtggagattgaccctttaattgcacatcatgtggtgatagatggctatacgtcactcctacatctattgctatactatagatccatctacaaaccccatactcgatatcacttccgtacatactaccaaagccaacccaaatcccatcaacgtatccaaaatctctagatcaattacagattatagatccaaacaacctatataacacctaacctcaaacccatcccaaagctaagccccttcccgcatcccaaccaaaatacacccagcacccatcatcccagcccccaaccaccaaagcccaccaaccgcctcttgaaaaacaaccattcccagcagtgccgtcgccaagaaattcgacgccgtattcgtgatggagactttgaccgtcgaggggccagccgttagcgcacgcgtgaagagtgcccacattattatgttgcagaggacgtttaagccgaggcaggcctgggtattgcgttagtaacagaattacagtataacacccagttatacatgtatattgtagtagataaatagtccagagacatgcatagcccagagacaaagagaaggggtgtaaacatacacctcgagtgagcatctcaatcacaggcgatgactcgagaccgaagaggtgagcgagggattgcgcgaaggccgttgtgtggtcgtccgtggtcctgtggaacgttagcatggttcgtggttacacggatcatagcttatatagctttttagcttgtatatatagagtatttctcctatcttgttatagggtagataatccacctacaatttcgcgaaaacaccgttcaatgcagcgaaggcgccgctcgttattgcgagcacgatccagggggatgtggaagactgagggattgactgaggcgttgaggtggacatgactgcggttgatatataactgtatatcctgtaatttatcaggctctttttataggcttgcaggctatgtgcaagtagcgtagaactcaagggctaggtattttggagtgacgttgaaggagcttgcgtgccaagactgatagtgacagataagggaggctgatatggatgatcgacgcgaaacatcacgatagctcaagtagcacttgtttgattaaaacgtcgagtataataccagtagatatgcaactaatctctatccatcactacggcgacagcctctgaactcgccatttagcacccgccccctcaccctcaatacgcacataccggaatcgatcatgcaagcgactccgccgtccttgccagaactccacagactccggcacaagcctcacaccaccccagaaaggcggcaggggaatatcttcaacacccgcaaacctctcctccatttccttaacctttgactccagtagcgcacgcccatcatcaacatccgtctgatcaatatccgccggaacaaccgagtctagcaacttcgccacactcttcctccgctgattctgctccatctgggccggctccgcagaccacaaaaccctactctgccaactcgcccatcccccaatccgactgccgcgctcgcgggtccgccaatacatctcgctctcctgacgactaagcggctcaagcaagccctcaatacggacctgacgctcaacactcgcccagctgaacgtcagcgcggcccatttatttcccgagccgacctcagaggtcacggttggctgtgagcccggttctggcatggcgcccagtgtatcggcgctctcgccgagcccgaagacttgtccgcccttgccttccctactaccccagttgctgtagacaacccagccgcgctcgtcgagttctttcaggtatacgacgcgtgcgctaacgcggcccgagggcagggaggctgttgatagggtgcatgtttctggggcggaggaggctgggagccgcgagtcgcggaaccagttgtggaattggtagaggggatccgtgccgtggatttgtgagatggttaggggtgggtttgtgccgaactggtgtgcgcgtgcggcgttcgagaggacttcggtttcggttgcggttttgtcggtggttgttgcggggattgcttggggttgggcatcttgggtggacttgttggaggttggtgcaatgtcacctggtgcgactttgggagattgatgttaacttgaggttcgtatgggttggggaggggttggtcggatcttttgcagagggatggcttgagatgtagactttggacttacaaattagcttctttggacgcctcccggcgtctgtctggcgttcctcttgggccatagttggcttgtgattgccgggttggttggttgagttggttgaggaatatcggagttggcggggttggcggggaacggtgcggaggaatgagtcaacggctgaacgcagaatcaagggtaaacaagtctgcatggaagacgatgagtgaatggcataagtgtaatacctcgaatttgtgagattgaagaaaagtccaagttggaagctgtgagttccgcagaaatcctgtaagacgttttcagcggaaactcccgaggcgtcatgccattccttggagaatgcggagtacaatagttagttatagaaaatcagacaacatgtttaacagtttaagtaattcactctgcttcattttcattttcgcgtttaaacgcggtgggagagttgagatgtctatgaacaggaataatcacagtggtatacagtgcttcaatgcacgacgccctttttgatcgccaaattaaacgccggaccttcgctggatgccaaaatatatcgtaaatccaaaaacaaataatagatatcccaccaggtatatccaactgccgccctgcagacgccgaaccggaaatatcccaacacagggatccagccctggcagagagattgtaggggtgcaacacaaacattaaatgggtatcacctggtcacatacacagccaagagaaattagagagacgaagaaacaccgatgagatcgatgatcttgccggccaccgcagaagggtatccgcgcgacatcatctcctggacgacggtggcggcattggcgtgatcatcggcgctcaggaatgcacgagtcattgcttcgtaggtgctgggctctcgcttctgaatgccaatgctgtcgtagatggccttggccttggtcacgttaccctcggcggcccagccgtggatcagtgtgttggcaatgtaggcagtcatctcaactttgcgtgcaaacatgttctggacgacttcttcggtgtcggtgacacggtggttggcgaccatggattcaaagagggcttggtagaggcatggctggaggcgcacacggcggtcggagacaacggtgtcgaagactttgcgcgcgccggcgaggtcgtgcaggacgcagcccttggcgtgcactagcgaagcatagtgcacggcatccgggtggtggcctgcggccttcatggattccagcacggcttcggcggcggccatgtttactggctccagggaagcgtgtgcgtcaatgagaagcttgtaggtgtgcagggtgggttgaatgtttcgagcctgcatacgctcgtagtaggccagaactttgctgatgtcgcgcttggtgttaaggaagtactggatcatggagttgtaaggcgcgggacgcggcttgtagttgggcatggactccatctcttcgaacatctcctcggcgaagcgttcgtcgctcacacggcaaagggcattcacaatggttccgtaggtaacacttgtcgggcgcacattgttggcacgcatctcggcaaagtacgcaagacagtcgtcaatgcggcgggccttgcctagcttgccgatgagcgcgttgtacaggaaggaagtgggctccacgccttcagcaacggcacggtgaaagaccctgagggcctcggtagcctcgtcgaaggtcttggtagactccttgagcgtggtgatgtacaagccgaaagtgttggccgagggtgcggaaccgagagcgagaagctcctggtggtactgagcagccagcttgcggtcacctagggtgaggcaagcagcgaccatggcatcaagaatcgagacccagccgtatttgacaacgctgaagttcatatcgaggggaacatcggtccgtgccatactgtgaatgtcgtgagccagagtcatgcggccagccttggccgcagcggtaatcagtttagcataggtgatgtagcgtgggtgacgaccaatgcggcgcatgttgttaagacgagttagggcctcattgaggtgattctcagtgcgcccgctggtcttctcaagctcctccgcgataatggcggatccgcggaaatcggtcgcgtgagcataaggatcaaacgattcgggaggcacagatggagtcgtgatcgatgtttccgccatggagacggggctttgacgatccgacgaaaggaacatctgagaaggcgaaacggaggtctgggagcctgcctccagataatcttgccacttcttgacgacatcaggacgactgacaaagagcttgccaacagcctggtcgatgaggccagtggtgtagagatccagagggagagcagaagacagagcgacgtcaagcatgtgcgcaaagcgaacgggatgagcgacatcgaacagcatggaaccgctgctgaccaacatgccagcctgaacttggagtgccagggtgaggtcagcagccttgagctgtgagatgccgatagggccaaggttggcgacagcgtgctcagcgagaggagaaactagaccaccattctctagcatggaccacaagagtgtcatggatgattgaggcgagagaaccgcggtcgattgcataaggacgcgaccaaagagatggagtgactcggtaatctgttctctgacgaggttggcgacagcagcgtgttgatcttgggtggcgttgcggatacgcttaaacatattgcgggcctggtgaagaccttcctcgacgtttccactcttgagcaaagcgaccgcatacatagctgtcggctggaccaggtccggggttgcctgacccaccgtgttcagcatgatccacaaggaacgggcagccgaaacattgccccggcggacctgaagggccagaagtgaaatggctgggttctgtcgtacgtcgggtgcggtgggcaggctatcgtaagcctcagaagcggtggggagatcgcccgcatcagccgcagcaatacagatgcgagaaatggcctgattccgggcttcatcatgcaactggttcttggcctggtccaatgccttgctgtagtctccggtgttgagcgagtgttgcacaagtgcatcttggacaatcacagcttccaccgcagaccaccggtcctggcgaccttcggttacctcgtcgaacgaagaacgaatacgatcaaggaactgcgcggcaccctcctctttgccacatgacaggtaagcacggatcacagcagcatagacctggctgtcctggcgctgtacgatactgaagacgccactgtcatcggagacagcgagccctcggtactcgttataacattcaacggcacttctgagatcaccagtggaagcaaatgcggtgatcatggacgggaagatggtagcatgtggagttattttctgtgattccatatgggcgtaaatccggatcatatcctccaccttaccttccttggcacaggcaatgataaggtgacggtacatctcgagcgggaagacaaggcgattgtgtcgtgccgtggcggtatcaaagagtttgacggcgatggacagggaagtatcctcagcgagaaggtcccgctcaagttcactcgactgaagcatgaacttgccaggctcttccataccaccgaatcgaacgcgttcctgctccaatgcctccttggccttgatcatgtcgtgagcccgggtgaccagaagctgaacaagggtctcataggtatcttcatcgggaattacccttcgacgaagcatgtcagagtagacatcgagggccttggagatagcctgagcggcatcagggtgaagacggatggcagcgagcagcagggcattatatgccccgacagtcggagtaaatccctctcggagcagagtctcaaacgcagcggggatttctgcaaatttgttggagttggccaatcgcacaatacggtccgaagcaatctggttggcttcagagacagcttccgaaacgacggcatcctcaacagcgggttcagcattcgcttctgcccccagcgcagcctcctcggcctgtgcctgctcctcctggatctgaatctcacgggccacggcctcctccacttgggcactaacatcctcgttcacggcagccttggtgggatgaggagctaaatcggacgcagcccggtcttcgtgaatattgtcagcatcctccgccgagggcttccaaccaatacggcgcttgaactcgaactgggtccaatcgctgtcatcaccggtctgctgggcgttctgccatgcggcataataggcagctagaccgagatctccatttccagatcctccttgacttgtcttggcgccagcaccggatgaactggacgcattggagaaggcattctgtaattgggttgtgcgggagaatttggcgggttgggcagcgagcgggttgaagggggttgtcgacgcgtatgactgggacgcggcgactacggattgagcatagccatgagtaaaggctttggtgaaactctggcgcgcgagatgggtgaatggtttgaagaccatttatctgataggcaacctctttattctaaagaggtaatgctggaccacagtcagtagttgtcgatgaatttcacgtgctttttcttaccttgcactcaagataatatcgaaagtgcaggttcatctgacgactgcctgtcgccaatgaacgcgcagatgcaagattaggatgatagtattaaaaggacctgttgttgacagggccagaaatttggtgaaaagagagaaaaagagagaaagagagagagaatggaagcctgaaaaataagaacgagggaggaatacgggcttctggaaggagatggagtttcacagtggaccagctggttagggccgatcttctccggagaatcctcttcatagtccgtactccgttggatctacgtagcttttgtgattgctccgccttgttcctcggatttcctacatgtctatgtatccaagtcttagatgtttgtactggtacattgatgcattgtatctggcatatcagatcttccttataccgcgggggttcccaaacgggtcgtctcgaggatacatcgactgcaagtatccagcactcccatactactccgtaagctggattcgaacagatcaggtggtaaaagtaaaagtacgcgatagacaccaatcaacatcaagatattcgcttgaaaccttggaaaaagggtccctggaagtgagtcacgttttccttccggttctttttcttctttcctttcctcggaacttccgcctcgtcttccccggccattcaccggccattcggcctcccgactggccgactcggctttaacggagaatgacgaagcggcagaataaaagtctgtaggcggtcagcctgtgatctggcttttgctttgatttgtaacctgaaaccaacccgtcgcgaacaggggtttgcctcaccctgcgctttcccacatgacatatcggctttatgattacggtctcttcgacatagtcgacgtcagttgggggtcgattggctccttgtctgggtctgaaaatgcccaaaatcggacttcttcagttgagatctcacacggatcttacccgtggcgaggcacctaccagactctggcccggttcttaatggggtattttccggagataatagcagtcctggtggaccgattttgggtgattttcaggcccaaacgaagagctaatccaccttctgaacttgtcgagtcttcctcgtggtgcttatcctttatgagttggattgagggcacttgaaggtagtccgctaagaatagtaataaagcacactgcggtacgctttgcatgaacatacttactccctaggcaccacggtgcgatatgacagtctatgtcggatgactgggatatcaacatccggtgttgttattgaagagatgccacgaggctttgcttgctttatcgaagagcatgccaacaaataaaaacgtgcctgctgatgagggttgacgacttcccatcgcggtgcgtacacttcaccttctcacactagcctgactaggatataattattacagacatcaataccatccgagcctctgtgagagagacacctcccaaaaatagccgagaaataaaaaggcacccgtggcgatccggctggatcaaacagcacttccagcgaaggctgacgtgcccaaatgctgggcacaccgactaccgaccaaattgtccggaatgatgaaatgtaattttgcaattgctaatatcgctattagatctaaccttaacatcaaataccggtgataccggccggcagatgcatcctgcaaaatcaccaatgcgttgcgagtactgcatacagatttgcagttacttggtcatttcaaccgacagtcacgagtgagagctctatctaatatgaactcgcatcattaagataaaataagctaccagatggcctctgacactgtacagacaataagaggtagatactgcattgttcgatcatgcatcttgggtatcggtcaagaaatgggcaacgccgcggtgaaagtactgctccttagtccagcggcttgatagtttgcattgtatttcttcttatcccttaaaccgcttgaattggtgtccgcctgcattctgtatcacccggccgttcagatcgctaatcaatccaggtgatgacttcttttttcatctcttcgtgcgctcgactgccaacccagctcacctatattgcgcactaatgttgctatcctcgtgcataagatgcacctaatagccgtatacagcggagaactacaagttgtagattaccagatgttcattatatatatgtgaacactgatacctagtgctaactcactgtataatgcggctcttccctaagttatgaatcgtatgttgtacgttgtacactttatttaaactgcctctagaactacgagaaaagccaatgtgatgccagtgggtcatatatgtactgacactccacatgggcgtcgatcgacatccgtgcgaatatcacaggtggagatgagtgcacagactctgcggtgcggtcaggcggtttgccaattttctcattcatccaacctagaaaatgtctggctgtgtatacctacatcgatatagcaactatggaacatcgccacatgtatctagagagcttatgcaatctccttaggccctagagaatgaaagggagtgtccccgttccccggtatttggagtatcctcatcatccgagaagtctgacagtgtcccagttgacttcgatggggcttggggatatgattgataaagtttttgcgataaatcacccattttggatccacccgccttggaccgtgtacgatttgcaatgggcgagattgccacgttcgattggaaggtttgatcggtggttactgaggcctgagttcgatacatgctagccaaggcaaatgtccctgaaggatagggcggctttggaaacttgcccggtagtcggcccaggatttgaatgttgcaagcaggttgtccgcttctattttctatttttccagtttctattgatttctattgatttgagctaagcttttaaatgtcactgccgatctggagaacctagagtaacaagtactgcctttcgcagatggtaaacgcagaagtgagggcggcatcatggatggtcagactggagacctggtacgtatctctccattcattccattcattctcgtccgcggagagactgccacgcttgtttgttgccattgtattgcgcggaatatatcttgtttactaaataggaagcatcgggctccgaggactgctctctttatgctgggtcatagtaaggcattcttgccaagcgcccatgacatcttccctgtgttgggcaccaagtcatgatcatagcaagcgctaacctcatcctcttgattattccactcagtgttgccgctaagtgaaattagagatcgctcgacgttgccaagcaagtaacaagtattggtgcgttatgcctcaggccacaaagcccgcccttgtgtcccaaatagagaaaaccgcctccttcatctcatcttccatctagctatcaaccttgctaatctcttgttcgctctcttttcgctggtcatataagcaatattctcatccatcctcgtcaaactcaagatggaggaagattttgtcctggagcggactaaacgtcgtcacgcgttggctgagattgagaagctgatcaagaaaagcccaaatctgcatattgaaccctctgaactgaaggtggctggtatttgccacattcccttgtcccttgaagggatacccaacaccatccacaattcttcatgccataccaagaagacctgccgttcccgtcgaaggaggaggagaacgagctgctagaacaaaagcctaacctggatttcatcatgtgggaagctcgcgctactgagtcttttcttactagcaactttggtgattgcttgtcatatgcatcggataagtacccccataatccgccaccctctggccaatatcgagagtaagttgcctctcacagctaccttgtcctgtccgctgaccgttcatgacagacttggagattatagatgttttggtcaactgctggaatgtatcgacttcaactggtacgctgtggaagcattatccacacttcaaggtcatcctgggaagtgaagcgaacggggatggtcgactgcttcgcggagaaatcatgaccatcaccggtatcatggttggtcgtttgagatccaagcggctgcgccctcatgttgttgccccggtaaggccttccataatggatggattctaaacaatctactaaccttgctctggtagatgctggttctgtctctcatgggtcattgtcatgcccgcgtcctggaggcagatttcgacggaaagattctcaacatacgcgcttctaagttgtacgatttcacgcaaaagaacaccgagttcgtgcattcgctgacgcggtattggcttggtggcgcgtgcggcaagattgagctgtgaacctcctagttcggtggtgaagttggtttatgctggacactgcaatatggtcctgtctggcaatggaaatgcagctcttaggatatgataatgaaattgctatctcgtggacgagcgtcacgacgtctacaacttaaatctctaattgagattgcatgtgggcaaaacaaatctagtgaatttgatagccaatgagaggatgcattgtatttcattctagtacggagtactccatagttccattcctactccatccagtatgggggtggtcccgccacgatggtccgcggctctgatttgtcagtcttcgatctcttatgcggaaggcattgagcctcgctatgtatggattggctatgtatggattgctgctgtaccactggctcatgtccgattagcagatcgtactatctaatagcttggaaagcaccatcgtggagcttgcgcggtgcataaagaatccacggctttgagaggttgacaaccgacataacttctagttgcattggatgaaacatgatacaaatctgaccataacattggaaacaagtgcagcgatgctcaacatagccaatgggaaacgtaccaccttgtgtggactttctcggctaaggcgacaattggagtgctgaagttcataactacttgaatatttgtcatgaaacagtaaggaacaaaaaggccaaggactttatctccccaaacagttcgactcatctagagtgggtcccgaaggaatccaccattgaattatggccaaggttcgctaactattccgtacaacatccttcgtatatgcctgtggttcgactgagccaaagccgttgtctacagccttgctaactatcggactgccatatttacttatgtgatgcaggtggtttcaattatgtagatacaaggttagttcacggaaggatctggatcgctttgaggggtctcaaagcagttagcaatacgagccccttgtataattacccctgacattgatagattgttttaggtaatatattcctagtaatacggtaatggagtaaaagatcatgcggtatatggtacataattttatggctcagaagtatgggatcaaagtatctttttatgggtaccttctgagaatcctctgatatcttttaggaagtagaatacaaaaagaatacacaacatacaacacgagattgtattgttaacaggtattaatagagtactcttgataagtactgagtactattgacagtataaccttggaacaagcgctgatatcacgtgccagcactaggtgcgtgcataagtcgtgggtccacccacacgggtcatggtgggaatcaatgggccgtggacacccgtcacctgtggccgaaaaaggcagctccggaaaacgaaattcaggcagatttctccaactgttcttgagaaacctgaaatgcttatttgatcgacacaggtagccctcaactgctcaccttctttttcatagaggttgatctgattcatcttttcccccacttggtcttggtgtctggccatactcccgtacacagtactttgttatccaccaggcactaacgccaacggtgcatgcaggtggcttgaactatgacgtgagagtaatttcaaggtcatatttatgactcacaccatagacttgcccaggtgcatattctaaaaaccctgctttatgctacctgagctcgacataaagataccctagtaatctttcggctgaaccggagatagaagcaatgccaagggctctttataggagcataatactcgatttggagcccacgtgacccggaaatacgggaatcggtagggtctcggagttgagttttcgcccggacgatccatgtgggtcgccaatatatcaagtccctcataatctgttcaatcagctctcatcatctgctttagggttatttacttgaccttttgcttggattggtatgtagaccaaaagaaaaaaaaaagaatagaggaatagaaaaacaaaagcttctcgaaggttgccaatccgtctcaccaagttctggatcacttgaaacgactcgggaggaagttccggaaccgtgggtgtttcgacggttaatagggaagcttaaggtcttcggagattagggtctaggccgctgtaatgatgcactacgtctatatttttctttgtatacttcgtattgtatatctgacatcccacattgggtgatcaacatgtacgatgatgttggctagtcgattattatcatgtatctagatacccatatagaatacagtattcaaactatagaagtgggcctccagggctagatcggcgtttccatgacgatactcatttccttttaaggacccgcgtcatccatgcctgggcatgtcgtagtcgcgtgcaacggccctccttcacctcctccgccacaattggattttggaattcggagcgagaacggaaagccctagagaaggatggcaaaaaaagtgaagcaattgggaatgatggttcttggttatccgaatgaaaatttttgttcttcgggtctctgccgtcttaaacgggatcaaaccattattattgccgggataaccggtaagagcttcctcgtctggtgacgaaatccactatgtggctactggccatacagctgtctcggcgaatgatttttcaatgaataaagggagtgactgtggctcggagccgtagtgcttataaatctcgccagatcccctacagggctgtagccgctggttacttactacacataccccctttcccccaacctcacctaatatatacctcttttttatataataatagcttgtacaaagctctgctatcatgacgcaaacactcctggacacaccgcgccatcccgggcgcagcgaacgaggctcggagagtgatagctcgctcgacgaggtcgcgcaggagaagcagaatgcgctggtggccacactcggccatcatggcaaggacctcgacaattcggcatccccgaagcggtggaagagtttctggacggcattccgacacctgtcgcacttgaccccgaaacaagttgacgatttcatggcgtcatacgtcatctataaccttgactggtccgacgagaagcaaatgaccgaggctctgggccccaattaccaagaaaaggtcggtgattgcttgaagtcctattacggagtcctgaaccacctttgcgcactgggcgatgtcgagaaaatgtacatcccaccgtggatgagccccaagtctagcgtgctcgagaatcagatcctgtacgagcgctcaatcgcgcacgacatcggcttgaggacaggaatgaaggtgttggatctgggctgcggccgcgggcgcgtcgccgcccacatggcgcaacacaccggcgcccaggtaacgggcctcaacattgacccgaaccaggtcgagcaggccgcggccttcaatcaggagcgcggactccagaataatttcgtcacccaagatttcaacgacctccccctgcctttcgccgacgagagcttcgatgccttctaccagatccaagcactgagtctgtgcaaggacctgcccgccctgttccgcgaggtgttccgtgtcgtcaagccgggctcgaagatctccctgttggactggatcagcctgccggcttacgatcctagtaacccggaacacgcggagctcatgcgccgcgtcaagccgctcatcggcgcggtcggtacacccacgcaggagactctcgaggcggcgttgaaggaggctgggtttgaggtcgtgcggtccgagaacgctagtatcgatggtctccaggccccgcttatcgataccgtcgatgtatacttccgcaccctccgccaggcgatccttgcgctcgtcaaggtgcatgtgctgccgcgccacttcaagaccttgattaaccgtctctgtttggatggacaggctttcgtcaagatggatcgcatgcgtctggccacaacgagttatagtatcattgcccagaagcccaaggcataggccccggacaagttctctcggccatactcgagatgtgaggaagttggatgggaatgaataattttccttctcatcaaactctgcggcgatcaagtcgggccaattatccagagcacatccccctcccaccgccaccgccaacgtcatcgtcgctcctcacatctcgattggacatctcgacacaaaataccctgtacatttataatcaacggattagaaggctgggggatttgacgcatggaggagtttcggttatttatctcatttatttatttttgatttttcagaggggtttcttgagcaataaggagtttatgaagggaattgcatctacatcgggatagcagtacatgtatgtacatcaaatatatcttgttccgagtaaatatctgcgacgataagtagttacacattaaggaaggccgaacaaaattataataaaaagtttcaagtcgggattcaatctatgaaaccaaaaaaaaaaaaacaagcaaaaagaaaaggtcgtgcccgggatcgaaccgggattgctggtatcagaaaccagagtgatagccattacactacacaacctgattgatgtgaacagccacttcttttagtatcaagagactattttcatgttttctatggacacttttgtcaggtcctgcaacatccccactagtccctattaggataattccatacacccttgtaactctagaatctggaaaatgttcacgtctcgtataagctgcatctgcatggcagcgtaagcccagcacaccttatccgcgctattacaacctactcctcccccccccaaccaccccgtgaccgcggggcagtccttccataatctccaagcgccccgtagatcccggcatttttctcccccacaacaacaacaatcatatctccaacctaccagtactcgatgtctcctctaccgccttccgtcacggcactgtctgcgccgggcaaggttctcctaaccgggggctatctcgtgctggaccgcggctacacgggcaccgtgtttgcgctcgatgcccgcatccatgttattgtccagcagctgaggaggggtcaccgccgcggggtatcgggatccgagcctgctccgggcgtcgaggcgctatccaattcgggcgttgaggaccaggacggggaggataccattgttgtccgttccccacagtttgtcgatgcggtgtgggaatatggtgtgcagcgatgtgggaatggtgggggtgtcaaggttctccaaaagggagatgggtatgcttggctgtcgctgtttgcgcgaaaacatcaattgactaattccaccttgcttctctctaggccgcgaaacccctttgtcgagacctctctcagctatgcattgacttatatcagctacgttgctgactctaaggacttcgggtccctgtctgtcaccatcatggctgacagcgactactactcggaaaccgctacctccaggggcccggcgtcgcagggacgtagtgggcggtttgtcaatttcggcgttcctctttttgaagcccacaagacaggactgggctcttcggctgctctcgttactgcgcttgtctctgccttggtcattcaccgtaccatgcagccggaggatctcggtactggccgggataaacttcataacctcgctcaagcggcccattgcgcagcccagggtaaggtcggatctggattcgacgttgctagtgctgtctacggttcgtgcctctaccgacgcttctcgccgtcaatcttggaatctctcggcgatgtaggctcggctgggttcgaggagcgtctgttccccatcgtggaggactctgatcccgagcatccatgggacaccgagtgtgttgactttggcatgcagctcccccgtgggatgcagctggttctgtgcgacgtggactgtggctctcagacgccttcgatggttaagaaggttctcgaatggcggaataacaaccgcaaggaagcggacgttctctgggctagcctccagaataacaatgagcgactgcgtcaagagctcaagcaccaggcccaacaccccgatgccaatcccgaaggcgacttttctgatattcgcacccttattcagcgaacacgccagcatattcgcacattgacccgccggacgggcgtcccaattgaacccagtgtgcagaccgagctgttagacagtgtttcagagatcgaaggtgtcattggcggtgtcgtgccgggggctggaggatacgatgccatcgcgctcctgatccaggatgatcccactgtgattgtgcgtctgagagatcatcttgcgaactggacgagcacgatcgaggatgactttggaggcaagatcggtaacgtacgactgctaggcgtccagcatggatccgaaggtgcgaaaaacgaaatgctggagcagtatgctggttgggtctagcttgctctgctctattaaaacaaggcaactggtgtcccagcccaccatgacttatcaacgtgtttcggctaccagcttagccttttctcccctattgcatcctgggccggaccctccagaaaatacacaggcctgtaggataattaattgcacgaaacacagctgaaacatcgactttgactcgggtgttcctatattccacctcccctaccactccatcagtgcccacctatctgcgtctctatcttcagaatcatccccctgcatatgcactacgaatcccatgcgtggccgaggattgcccgttctttttttttttcccccgacgttcccctatgtgcgaccaggtctgtttgccaggtatttcaatatagcctggactcctctcaaggaaacgacctctacaggctaatattcttcggctctatgatacctagtatgtgagatagaatatacatagaatccacttgcacttgcattttatggtgacagtgaaacaatgaaacaatgaaacagtgataactgcatgtatactccgtattatagtcatgagatccctaatcgtcgtacagagagtacaaagctacacatgtggagaaagcgacctgtcttgtccatgcaactatccagagatgtccagatctacatcgtatcaacgatatagcatacaagactcttggcctaactaatttccccggatcttcaattgctattcgctatttactcttataataataccatagaactaaagtactaaaatactagattatgggcatgttttatttttctttgactcaaaaataggggaaacattttgcgtgcagttagggtcaagaagcctattaggcctgcagatccccttttgccttctttccttctcttcaaccaattcaaataatacaatcgaatatcatttgggggggtacatatacgtacagccactccatccacactagttgaggtattatcgcgcctcccgcttagtcttgagtcttgactcctcacatctgcactgcatctctctccctctgtctcctctcattccagctctcacagactaccacttttcacccaaacattctcccgttgacagtgccccctttcctaacggggtaaagtcaatcctcatccgccatcggggcatcctaaaatgtccacaaccgatcacccggagtcgggggccaacaccaacagagatatcaaccaacccccaaccacaacaccgcaggaccaacaacagacctcaccgaccacagagctccaagcccagacagaccttgccgctgatacatccatcccatccgcccatgaccaaacacccatgaaccagatccagatccaccccgcgactggccctggtggcgaaagcgaattcgcccccgagacaacatcaccgaccaccaacccttctcaaactttcgataacgaacctgctgtcgcgctggcaaaactgactacatcaccttcaatggataccgacgagcgaaagaacgcgcccgagacttcgaccgagcactccgatgatggctccgggaaggaagtcgaggaggatgatgctggcccggcgctggtgatcacgctgctgttgacaacggggtcgcgacatccgtttactatcgatggaaactatctcaggaagcgatcggtgaatgttgagaactttgatccgttcttgatgagcgtctacacgctaaaggagttgatctggcgcgaatggagacctggtaagagttcgacccagacccagacccagacccagacccagacatctacatggacattggatgggcaggatccatcctgatgtgggatgtcatggaacgagagtagctaagctaacattgttgttgatgcagattgggagacccgtccctcgtcaccgagctctatccgtcttatttcgttcgggaagttgttagatgataaatcgcctatctctggtatgttttttttccctccttgtggttgcatggttgctatggctatagactttgatactaacaaagcgactagactccaagttcagcaaggaacatccaaacgtcatccatatgaccgtcaagccgcaagaagtcgtcgacgatgaagatgcaaagggaaccaagacacaatacagccgggagcgcgaagcaagtgagcgcagccctggatgccgatgcgtgatccaataatctcgctgcccgatctacgagtatcaggtgtcgacggcatgcttccagcagtgttgtctgctgcttactacttccaccctgacacccaaccttcccttccttgtccgtcttccgacaatcctccaccctcaatctacctgtcattgcagtgatacgcctaattctgcctggacgcaggatcaacatccctgttttgccgagccaacatgggcactctggaaacggcgtttcgacatttatttcttctgaccggatcctaggaccatgatttcgaccggtttttctcatatctcttatttctgtgccatgttcgagccgtttccctgttctctcatcgccatatcatctgcatgcgggcctcatttatctctccatggatcttctctggagtgcttcgatgtcttctcttcgacatgtcttccgagggctcgttctgagattcattctttgcttttcgcattgctgtcaccattattcttaccccgatttctcgatatataccccctccgatccgacttccctttctctttgtgctctatcattttctctgtatggttccttttcttatggcctttcgtgtacttacgactttgtccccctcctttgtcctccttatccttccttttctcgcttttcattccttttgcttgctttttctaactgccttaaggtggttagtcgtagtgtatagggtgtttttggaggaggctgacatgtttctttgtcttatatttaataacttctaaagtgcctatatatctccgcgggcttagtgggaattgctagtcaattcgaggcagacgatcaatccggagtagtacgttgttcatgcatagtttagaaatctctataatataacggctggaagtggtcctgcaagactgcgtggtagagatagaccatggattaattcaatatatcgagagtaatacattgccttgataacagacagcagacacatcggaaatgtatcaagccaagtgatctctcattctatttgacgacataaggtaggaaggagtatgacgagggacgcaagaggagaatagtagaacacatcgacatagaagagaagccaaaagaacaccatatcatcaaagccattagaaatccatcttgagtctcttctccatctcatcatggaaagcaggcggctcacggaggtcatcacctaaaccaaccaggtcagccaaaacacatccaaaccaaaaccaaaacaccagataagaacctaacataccgtggtaaatatcctcccactgaacctcactatcccgacctccaataacaagaatatcctcatgaacatttccaccccgcacaccgccaagcacagcaggccggaaagtcccatcgcgaacgatcttcagctccatcccgcgacgaacaggctccgcaatcccgtacgcccgacgcagtccctccatcttcaaggcgtcctgtgttgcccgccacgagataagtcgtgcctcgagcgggtgcgtagatgtgggaacatcgccgctggagttcgtggacgacgcgtgcgcggtggcggcctgcgtgagcttgttgcggagcgtatcagggagtcccggggcggagggcgcgcctttagatgggcggggtgcttggaggcctgcttgttgccgggttgtgaggttgctggtttgtgttgcgttgccgcttgggggggcgatgcggagggactggggtttgtgttagttttgtgtgtttagaattgggatggggtttgattgagaggttcgagatggagtttggtgatggtggtgttgggaaggtgttctagatgcttgcttatgggctggactccagggtgaggttccgggtccgtagcttgataacgtaccatgatggattgataatgctaggtttttgggttcaagactcgaaatcacagattggataagtgtaggtctgtatttaaagctcaaaaaggagatagaaaagtagaaacaagagcaaagggagggtggaagatgacaagcaacgatgatgcttaggcagagagaagcagcgcggccagctcctacgacagacgagagaaaccaactacgcaacaccccaattcaaatcacgtgccctccacttccgccggcaacaattctatcgcgacattctcgacctagcgaaaggggagacaatttgcacgcattacaccacccaaaatgtcccaattactctccccaatagcccgtcgggccctacggactctgacccaccgtcctgcggtctcctcgcccctctgccgcaccctcaccacatcacccgccatctccttcgcctcgaaacaatctcccatcacctcccgcctcaacttccaccccgtcttccgtacagccgccgtcggtttctccgccgtgccaaagcggcaattctccagctcgcctatcatccgcgctacatacaaccaggtccggcgcggtatccgcactggacagcaggctcgccgcggtaaatcgcctgcactgaagggtacgcctgggttgaagggtgtttgtcttaagactggtgttactaagccgaagaagcctaactctggcgagaggaaggttgcaagagtgcggttgagttctgggaaggttattactgcttatattcctggtgaaggtaagatttatttgcactcgaattggtgttggaataggattctgtagactctgttccagtgctggtttttcctacggggctttttggctaatttttttgtacaggccacaatatccagcagcatagtgttgtccaggtccgtggcggacgtgctcaggattgtcctggtgtgaagtatacccttgttcgtggtgcgatggatttggtaagtcactttttgcttctgtttctatatacctacttcccgggtgtatgtctttctagattttttactgattatactttactagggtggtgttggaagccgtatgacgagtcgctcgaagtacggtgcgaagaagccgaagaccgactaagatggatttggggatgcaggttgatcgtgatcgacctgttgtgagattatacaatattggccttgtttcatcagctgctgtataagagactgggctactggattttgggtttttatgctcttcggagagcaaactctttctgttcatatttgcatgtaacaatacggattgcgactgtttatttgcatattatctgtttcgacgttcaagctcttcaagtcaattttattgaaatagaagtataggaaatggttccggcaatatcactttactccggacccatgcaacgaaacaaaccccaaaaaaggatgaacgctcgaaaccccatagtaacacatgtcagacatcgaagtaaacctcctgggcgtaacgcgataatgggaatcaaaatgaaacagttaaaaacgtaaacctgcagccttttgcccaagcgcggtaagatcgaacagcatattgcttcatctaggtgtgatatccaacccgagtagagtagcgggtggacagagatttcaccgagtttttgtagttgcggcgcaaatgggtgacactatcagccccccaaatgcgcagcgcttcatctcaagatgatgacaaccgacccgcgcattgtcgctaaaaaggaacgactgggctatccgtgagtagacccagacggatggtgaacatagtaaaatcagtcgtatttcttgtcccatccgttcggcttctccatcttgttgatatcgaaccaacgcttggtgcctgtatcagaattagttttgcactagaagtatagattggagggtcatggacatacaagagtaatccttccagtcgaagttatctttcggttggcaggaacatctcaagtccaggcgtttcttttcatccgaggggcaatgtgtgaatgggacatggtagtaggcgatgtcatcccagaaatggatttcctccttctttaacatcagagaagcggcgatggagtgaaccggcgcatcgccccaccgctcatagaagaaaccaccgtccttgtccaaagacgtgaaatagtcaatatatgcgtcggatcgcagccactccaagctgccaatctcaaagttcgaccactgccagaaaagttaggtctgttggagattaactcaatttcaatcacttacaaagtggcagttgttgtagctttctccatcgtcgttgctgatgaattccatggcatttccctctgagacatactcggggtgactacctgtgaacttcttcacgctatcccacagggtaggaatggtcgccacatactcgaagagactgatgacaaaactatacttcttgttgttctccttcataaagcggaacggatcggagtcgacatcacagtagagctcaatgctaggctcgacgcgccagtagtactcatagttcatcataagcgggtggcggaagaagaacccagactcataacggcacatatggcggtaactctcggaaccgccgtaaatgatcttcttgcggtccatctcctgtcgcgcttcttgggccttgtcctgatcgatccactctgggtatgaccagtgttccttggggatgacaccatagtgagttttgccagagaccaatgcagtggtcaatttcttgaactcatcatcgaactcgtggtcgttcaggaacacccaatcatagttgtagttgtggttgaaacggtcctcgactgttcgaatggacttgaccatgtcccaaaggtcggagttgcgcgcgagggtgacaaaagtggcatttactcgctcgccccggtgtgaaccgataacttgcggtttttgcgacttgactgagtcgtatgtgggagtcttgggtgtaggggtggttattccggttgtaggaatcgagatggaggattgtgagatgaagaagaagaccaccaatgcctacccaacattagcaacggatattcataaatatgaaagaaagacttaccacgacggcaaagattaaataccgcgcatatcgaatagtgacggacatgatgatgtggggggggggagaacaaggatgattccccgttaagtggcaaggcaacaatagatatcagaccggtgcagttggaaccaatccaatttagaaagcgagcgacatcaatggagaatgggagagaagcaaaaatgaaaagccgccactggaaatcccgaagatgtttagggggggccagaggagattaaaggtggaaaagatgaaaggccgcgcaagacaatgacaaccgctttcagccactttgggtgtcacccaatttgagacattctagtgctcaggggatattattagggtacgggggtgggtttgtaagatccatctccattcgatcttaggggcgatgtcacatccacttataaaagagacataaaagggaaaggattctcgttgctatatgattttaggatgatatctctgtctttggttgttaaccagtgttattgttactatccgagtatatacactaagtacgtagagggccaagtgtatccccgtatactccaaagcctcatatagctctataacatctcatctccgccgaatccttgatctttctttatatatcaatgttcaaagctgcacatcaaatagacgatcgacgagttgtggcttggcaaaaagagcagcctttctgcctgaggcatccgcactccagaacttcccgttcatcgatcgcacctttcctcactaccccccactaagctattcacctccccacctctttcctatccttcctcattcagaggatggctttcttcggatttgatacaaccctgcccagggaccgtgatggttccggggccaaggggttcttcgaaaacccagatccctttgccgatattgctcgagctaatgcgctaggagatgacgacgtgtgagcttatctttttttaatggggaacgggccattatacttatcatcatttaggatcgacttcgaggatacctacgatggcctcggggatcagcttcccgacgaccaggacgagttcaacgatgacacgtttggcgaagctggccccagtacatccattggcagagactttgatttcttcggaaagaccgctcaggtttccgacgccattggcgaggaacaggttcgattcagtctacaaaaccccaatgtaggccgagtcgctccccagcccgcccaaattcctgttcagccggccgccacccagactaccaagcgctcaggctatgagaagtattcggatcccggctatattccagacttgcaagccaaatctagtgtatggggtgtctcgcagaagaaaactgaacccgctgccgctgctgctgccccgagccggaagatgatgagcttggaggaagtcgaggcacagatgcgttatcatggccataataccgcgacccccgccgcagaggcctttctgcgatccatggtggagcagcctcagtacccacctcagctccagcacctccagacgcttcctgatgggttccctccggtgcctccagagttccttcaggcacagatgaaacagggccacctacccccacaaatgccacacccaccgcctggtatgccggagctctatggtggccctggaaacatgccacccggtgggccgttgcatatgatgcagaacgtcaatctacccccgcaaaacatgccgcctcttggcccgcgccacggtgtcccaccgcaggcccaggcccagcgccctcagcaacctcttcaccatcagcaaggcccggcgccaagccgcggttccaacaatggcatgccggtaatcactaacccgcaacaactcatgcatctcacagaagagcagcgtaacacttatttggtggaggatgctaagcgggcaaagcgcaaccacaagatcttcctactgtcccgaggcaacggtctgatgaccccgcaggacaagaatttcatcacccgtatccagttgcaacagctggtcgcggctgctggaaatgtcgcagattcagatccggaggccgtgctagcggaggacttctactaccaagtctacagccagatccgtggcgcaccgcgccaacacccacaccagcctcttggtcacttcgcccagacttatctgctccagacaggtaaccggctcggcgggcatcggcggggcaatttccagagtgccgacaaccacatgcagcgaatgcagcagcaggtccagcgtgccgtagaggcggcaaaggccaagcccaagaataagcagctcatcatcgagggcagcttgggcaagatctcatttagcaatgccaaggcgcctaagcctatgctcaacattaagcgccctgctagctcggagggacctaagcccaagaagcagtcggatctgagtctcagcgatcgcaagtcgatccttacgaatctcgaaggtgtttacagtgcattgatggcaatggaagatatggagcgcacgatgccgccaccccccgaggaaggcgatgccgaggcaatccaggaacacatggaatggagacagaagcttcattcgcttaatcagaagttgtggcggtcattgaaggtgatggaacccattgtgcccaactcgacgacaccacacccctttatcgcattcttgtcataccccaagggcaagaaggccattcctcgcatcttccgtcacattgatcaggaacagcgtgtcactatcctcaccatgattgtcgtccacctggatagcctggatgtggtacgtcttgctcaacctgtgccgggcgaggcccagccaccactcggtgtgcgcgaggccattgacctgttctcactggctgtcatgccctgtcttttgggatacgtgaacgaggcgccattcaacatcattattggtcttttgggattggtcatcaaccaaacccacgtgcagactgtggctcgcaccaaggttggcttggggatcttgaccatgttgctcagtcgtgccgagatcgtcaaggaggccggtcaggcttccgagcatgattggcagcagtgggtcgagaagttcaacgtgctgtttgacactttagaactcggattaaatgacattttccctggatcgattagctccggcgacgatatgtatgtgtggcagttccttgctgccgtgggcattggcgccagtcctgagcagcagcagcgcctggttattgccgttaagtgagtgtttccgtttcgatcctagtgcagaggaacaatgctaatccatttgttacagggaccgtgtcatggaaacagtgggatacagcaagacccttcctgccgatatgggcagtcaacgtctgaacaacgtcaacctcttcatgcgggctattggtctggacgttgagctcctgggttagaaaggctattctatttctgagcctccatgggtatatacccttggcatgttagacaccacttctgtgccagctcgtccagacttggatgaatgagcatgagccccgaggccccgaggcattgattactcgatggtctcacggggcaatgttgctgaaatgcaacacactatctaccacatctccagggaatccggggccctggcaaaaatcaggttgcattaatgtgcctgaacccggtttattttacttttttccccaataccaatttcacttcaatgttctatatttaatgaacacagtaaataagattttgccgagagttccccgggaacggactgccccttgcatatgtccctattcggcagggttgagccgacgttgtttgcaggcaatccgggagtttcagggaaatttcggggattttccagggatcttctctttgcatcttcccacatctctgcccggctttgcatatccttgcatatccttgcccgtttcgagactcagggctgttttcaccgccacgctcgccatcattacacatacttgatgtacataatgttcgcgtcaacaatgataacctcacttggaagcgaaagggaaattagaggtgcaaacatgtagatcagtgggcgaaaatgtaaataaatgtaaaacaagatgaatatcaaaccaccaggccgcatcatcgcagatccacgtggtgagggccatcccgcccttcaatttccccttaaaaagctgcccctcgtccgcattctactccgtactctccccgtactcttccccatctccctaccatcaattattacacggaatttaatcatgtctgctggttctgttcttgttgctgggtaagtggttgaattacctatttgggatcttatagtgagctaattccccgcaagtggcacgggctacattggctcgttcaccaccctggccctccttgaggctggctacaaggtcgtcgttgccgacaacctgtacaactcttcagtcgaggccctccaccgtattgagctgatctgcggcaagaaggccgagttcatcaagctcgatgtcaccgtggagaacagcttcgaccaagtgttcgaagctcaccccgacattgacagcgttatccacttcgctgccctgaaggtgtgtacccgatgaattaagaaagcataaatcgtatacccttcgatccagtagctgatccaattgtctttatccaggccgttggcgagtctggcgagaagcccctggactactggctggtcaacgtctacggcaccatcaacctcctgcgctccatggtgaagcacaatgttaccaacattgtcttctccagctccgccaccgtctacggcgatgccacccgcttccccaacatgatccccatccctgaggactgccctctaggccctaccaacccctacggcaacaccaagttcgccgtcgagaccgccatcaccgacgcgatcaacgcccagcgcaacaatgccatcaaggcaggtaacgaggctgaagccaagaagtggaacggtgctctgctccgctacttcaaccctgccggtgctcatcccagcggtattatgggcgaggacccccagggtgtcccctacaacctgctccccctgcttgcccaggtcgctactggcaagcgcgagaagttgatggtctttggtgatggtatgcaagccccttcttcccattattgacactccctgatctaacaccatcatagactacgcctcgcacgacggtaccgccatccgcgattacattcacatcctagatctcgcagatggccacctcaaggccctgaaatacctgcgtgccaacaaccccggtgtgcgcgcttggaacttgggtaccggcaagggcagcactgtctacgagatgatccgcgccttctccaccgctgtcggaaaggaccagccctacgaggttgccccccgtcgcgctggcgatgtcctcaacctcactgccaaccccacccgcgcccacaccgagcttggctggaaggctgaacgtaccctcgagcaggcttgcgaggatctctggctctggactaagaacaaccccgagggttaccgccaggagccccctgctgagctgctcgctcagcttaagaagtgaatttagttcgggtactgatgtagcacacgtgaattgtggtttgtaatgatcttgtctttgttgatatagaagtcgtggatcttgttgttagtatacatgaaacgaatttcctttttgtgatgattggtctataaatttgagcctattctctgttcacggtagaatgtagcccttaactccgtctatatatcacaccatacctataaaacaggtatacacatatctcactcatttctgagctttgcgactcctcctcgacccatcagccttcttccccttcttctcggccgcctccttcttcgccttctcagcctcagccttctgcttctcaacctcagcttccttcttctcaaaagcccttataacagcactctgcttctccgcctcctcgaccatcttctcactgaaaacccatagcttcttcccaacctcatcattgcgcacatccacccgcgcataatccatctcccgacactccttaatgaaccacccacccacaccccgcccatactgctgctccatcgccgcatacagaatactctgcgcaccctgaacaggcgacttgagcagcagccaccagagaggccaagtgagcaagtacagccaaagaccccacaacgacccaccagtcaaccagcgccgcatgcccggagtccgcgtcaccccagggtcaacaacgatgacccgcgtacacggcggcagactatccggcctctcgtaagcattcaaatgccgctggaacgagtgcgcgaagatattcagcgcaagcttgctgagcgcgtacacgcccttgggctgcgcgtacagcgccggagacgtcttcgtgcgcttcgataccaccttctgcttcccgcgcgccatagagtccaggtttttcaagtcaccgccgatatagccggagcatgttgcgaagatgacgcgcacgtcgcggtgtgcgggctgcgcgcggagggctgggctgaggatgctaaggaggtggaagtttgcgaggtagtttgtttgccattctaggtcaataccgtctattgttaggggacggggtttggagggctcgactgttccaccggcgaggattatgcagtctagtcgacggggtgggatgttgtcgatccattttgttgcgaagaggcggattgagtgcagggaggagaggtcgacttgttcggcgtagatgagagggttttttgtgctggtgcggaggtcgtcgatatattcggagagatagaggtcggagggtggttggcgggttaggaggattacttgggcgccgcgagttgcgagcccgcggactacttctgcgcctatcccggaggtgcccccctggatttggtttttgtcagcttggttgattgggtagtgatgtggtgctggaggggtgttcttaccgttaccattatcacttttgatcgcatcattcgctcggagctgttgcgggctccttcaaaatagtatttcagcgccgcgagggctagcacccatggtgctatgcggaggattgtccaagcatacgggatggatgagacaccatcccgcaggccctgggcaatgatagggatgggcataattaattgagaaatgaagatgggaagagagaggacaggtgtgtgtctcctaagggatttctccaatgtacacgtatctccgcttatcttattccttatcgccaccctctaattccgctccgcccctcaaccctctttcttccttctttctttgccttgacagctctacaagtaccaaccatggcctctgaggacgaagactatttcctcccaccggagcagcagcgccccttcagctccggaatccgccgcaaacgcgtgcagttcgtgcgctcgtccaatctagacaccacaacagccccaactccctctctctccgggactagcatcgcagacacatacctctctattgtgatgggccaatcagccccaagtacatcaacacatacaccaactcagcgcgcagaatcaccaccaattcgtacgcagtccgcaccgccaacttcagacatattcccgcctccatccacagtggcgcccgcggcccaagaatactgtgacgtgtgccagctacctctcccaccacaagccccagcggacacaacagaccaaaaacttcgcccgcacgaagcctccctcgcgcatcaaatctgcctcgctcactctcacccgccatcgcacctcgaccgcacgcgcacaggtctccgatatctctctacatacggttgggatcctgatagtaggcttgggctcggcgcttcgggtcgtgagggtattcgtgaacctatcaaacctcgcgtcaagcatggtacggctgggttgggaactgggcttgatcaggatggagatccgctgccgcctagaccggcgccgccggtgaaggtgcagaagcttaattccaaacaggcgcggaataaagccgcggaagataagaagagggcggaaaggctgaggaaggctttttatcagagtgatgaggttttacactatcttggggaggggatttaggtcgtggattttatggatggaggagagttggataccctcattttgtttgttttttgtgcttgatgatacccctattgttatttgttattctttaaatgggtagcgattagaacccaaaaacgctgtcaaactatattcaattacaaaagtaagctttgtcaatcaaagcgttactttatataaaatcaagaagccctccgagcccgcttaattgagcgatcaactaggttttcaaagcctactagatcactatacaatccgccgcttttctcgagaaagaagtaagcgaattacgcaccgccaataagaagcagaagcactagatcccggaggcagatacccgccgaagaagctctctcagtctcagaagcctctatattaattatacagcaataggaagcaattgaggcacctgcctccagtcccggtacaacttaggaaacgagatacatagagatagaactagagatagcccaaaaatgacatgcgttccttgggaaaccatgccgaattaaccactgccagtaaaatccatttgcccaatctgccattcatccaataaatcaaatcctagaaaatcatcatagagcaacggattattctcatactgctctacctgtgtatgcagcgaagcgtctgcatccaccatggtgttatcttgtacttgaccgacactgttgggtggaatcaagtacagatttttcttggcaagaatctcctcgaataatggcagggctcgtttcagggctggtatttcttttccctgtgtgagaacaagcattgtctggctaatagagatttgggccatcgaacgaacaagatctgtctcggctgtatcgagggccgattcgatgtgaagagcgagcagtgcaattattgtggttatactggtaagtctatcgttagatatccatatttttgcgctctgtagatcgggaaatggggaaaagagaatggacggcacatacaaagatatgggaaagtcctggagggtaccactcgccagaacccttttggtaattgtgtccaactccaaaatagcagaccgaagccgctgtttgacccactcgctccagtccgcatgatgggtctgctgccaacaacgtcgtatcaatcgacacaagatgcattcaaatctgtagcccatggcttgcatagccagatagtacacatcggttccaatgttctcattcatatgcatcttgacagggagtgatttgcgccatgaatcaagcgagtgaaacatctggcggggatcttgctgtggcttggttgtcacgttggacaaacactgtccgactaaataagagtcagccatgcttgtggtttcagttatgggttgatgataagaaggatagagcgtaacaacaaagaatcgaataaaaccagcacctacatattcgagacaactcgcattgaacaacaggcaaggccctttgttgaggcgtgactggtgatagcaagtcagatgatacttccgagctaatctccacttcccagtcatcttccgtcctcagtctgatcgtggaggtagtcgcgagtagtcgcgagcgtctagtattgacagagacatgaaaaatgtctaaagtctacgtagctacagtaaacataatgcaggaagaacagaacatagtgacgagaagaaggacgtacgtagagagcccaccagatccttctatacaacttgaagactgtaccagctttgtcttctcgagcacacctgtggaaaaatccgtaggcagttaatacccgcaatactcattccaggtgctatagtccaggagtaggaaacgtacacgttgcgtatgtcaagcttagtggcaagacggattgcgttgtggaaccagtagccaaagtctcggtcggtagggtggtcgagaatcaccatgcacaagatgatggatccctgcagcatcaacaatgggtcatcttcagcggaaaagtcgtgaagcagcttggccttggaaaaaaacaactcttgcgcggccgagcggctagcaaagccgcaggcggatagcacgtctgctggcgcatggacactggccggtgccaatatgacgtatagcaagaacaatgagcagtggccagattgatagccgcggataaaatcaactctattgatcaccggagcaaaggggtagacgtggtcaaagtatgtcttaacgagggaatctctgttatgatttgtcagtgagtagaggcaaatgcgaaaccccgaataagatggaggattataagcttggtctcacaggtagcgtgaaggaggtagatcaaatacccccttcttggcaagaaattcgttgtcaatgtcgtccaattgaggttgcttggcccatcgacaattccgagtactaaaactatattccgggcttgggcggtagggagtgctgaaaatggggtggtgtcgactagattgtgtagtcttttccccggcgtcgtttaagatattgagatagaacagatctagctcagcctgacgtgggctttggccatccagatcggaagtcgaaggctgggccgactgttcgagtgattagattgattagatcgattagatcgattgagattttgaattggaacactgtcaatcatctaaaacatactcgtacatgatcagggatcggtgaaacatggtttaatttccttggagcccatccaagttagcacgcgcctaaaagctactaggataaaccatgagccatcctatcattaatcaactcacctagcacgacccttacggaccggtagtacacagtccttgacacactgcctgctggtacaacagctgcaggggaggccaatctcggcggcatcgcatttggtcttgcgtgcacggcagggcacacatgccttattggctttgagggcacgctttccggcttgtccggacaccgcggttggcttggccccagaaggattcatccgggagaagtgtgtttgttgcagcctcggaattgcacggacggggtaagctttgttttaagtctttcgaggctcggtgattcaagttccggtccgatcggggactcacataatccttgaattcagccatggaggccccccatttatattcccggttcccggccgcttcgtacatgtaaggagtttctatgctacattatagatttattgaaataatcctgctgtacaattaagtttatgttgccatccaagctgatttgggggcgtagcagatcccccgctatttaatgtgatctaaacagtctcttcaaccttactctctagcccatttggctcacctacaatcatggcgccttgccgacggctcatcgtctccagcaccttagctgcttcgagggaatacttgcacttgctgcgtatctgcgggccgtacttgtagaaaagaaacgggaaaggcacgcacgcaagaactaggaatgcaggaatggagctcgcccattgatttccgagcttctcgtacatttgggtggtaaacaacggaaacgcagtgccgaacaaggaccgaaccactgagttggctgccataacagaagcagcatagacggtatctttacgcaggtgagcaagtgcattgttgcataaggtcacggagtaacgatcaaaacttacaagagtcgatcaggtagctcatcagcgagatgaagaccatgacgagtccgcacgagaagaacacggcaccgataatgggtacaatccagtgcaccgatggatacgtcgtccaggcaaacatgaacaatccaatcggaaccacgaaagagcctaccatagccgtactcagtctggcttctggctcgactgtgcctcctcctgcgtcgatctccttgcaaagacgcacatagcgtttgttgtctacgccggccgccagcgtggcaagacagacgccaatggcgacgccgataaacggaagtccggcgatgccctggctccagcctcgagtatattggaagacgataggaaacccggcaaaaaacatgtaaagtgtgccatagatgatggcgacgtacagcgacgtcagcaagacaatgggctcgcggaacaacaagatccaggggcgcgtgagagagatcaatagctcctgcgagaaggtcttgggcggctttcccgcattgatcctagacacatatactcgtcctgtcacccgggaaagggcttcggctcgacgttggagaattaacggtgcgtatgtttcgggggtgatcagcatcgtgataatcgagaccacgcctgccattatagcgattaacccgagaggccagcgccaaccctgtttctcagcaagaaaaccaccggcaaggggccctaaaatgagaaacaatttagtaagtttcaagtgtatcagggcagaaatggcaggaaatggcaacatgtaagaagggcatcttccaccacttaccaagcgcaggtcccagaaaaggagctgtgacaaaaaatcccgttgcgactccgcgctgtgtcttgctaaacatgtcggcaatgacacccccggtattggtcatcgacgacgaaccaaatgcgctagcgaagaagcgaagaaccagcaaggccgcgatattgggagagcaggccgccgccacgctgaacgccgtgtacgccatgaacgaaatcacatagatggacttgcggccatacatctccgaaagaggcgcccatatcagcggtcctacagcgaaccctaacacgaagagcgacaagcccagcgtggccacctcctccgacacgttaaattgctgctcgatgcctccgatgccgctcacatacaccgagctggaaaaggtcaccacaaacgtggatagagactggagaatggagatggcccattttcgcccattggaaaaattcatggcgtcttggtggtcattgtgcaggtaatcgataatgtatgggtcatcttctgtacctttaccagtgtaattctggttgcagacattgtcgttgaggcgtgcgtggaagaaaagatattggatccaggacatgcgtcgagaggatgcctgtgaattcttgacttgctgagggatctcattgttggagacagtggcctcgggaacgacagccatgttgggaacgacaggaagaacagggaagcaagtgttaagattcaagatatagacggagcaaaaccaactagttttcatgcttgaactgtctttactaagtaagtatacaaatcgtgcgcacagttattggttatatagttcatctcggacattcgcaatcggagtttcagcatggcgatattgccgagaacaaaagcccgcggcattatctgcggaaatatattttcttgacacacgacaaagttgggcgatatcgccgaagtgtatgcatcggcccagatcaggatattttctaagctagctagtgatctgtaatccacaggcttccatatgcttgtggacgtggtgtgccttttaatagatttcggccccagctgttgacatgatatatgtgactaccgctggaatcatcgattgttcgaggacgacagttgctctttctctatagaagtctctttagaaggaggaatatcccggaaatttgtattgtctagagcctgagttgatctaggctattaaaagtgatgttatcaagaactaaattgattcgccctagtcgtttctggccttaggtcatttttggcgtcaatcccacaggtcctgatattctagttgtactgttgtggttttacgtggatatcagttttgaatgagatgcaatgtttgtttctgtctaaggcttgacttgaataattaccgtgtactaggtagtgcaacttgaaactgtgtccagattctacctagcataaattggagtgtagtgaaaacattcccatgttaagtcttataggactcatcttaggagagaaataaaaaaccgctgagaatagcgccttgaatgctcgggaccagacctgaccaacagaaagacaaggaacagaatggtatcacaaaagcgctgaatgcagcaggacacaagaaacagggtggaatcaagaggaatggagaatggagaaggctacttgaagaaacggtattttttctccttcttctcctttttctctttctccttcttgtccttatctttcttgtcaggcttcccgctgccagatgaggcagggctgcttctgcttccgtttagagacataccagccatcagcgcctctggcggagctggggggttgaggtgtgccgttgacacaggcttcttctgtggcggcggattgggggctgggggagcctcgcgctcgaagagatgggccggggcagtaggtttggggcgctcggatgggaggtcgagacgacgccggtcaacaccaaggtcgcctacctggcggaggaagagacctggggtcagcatgtgcgtcgtggcaaggtagacgtcccggttgtatgccgctgagacttcataacaagctcgtgactcgccgtaggtagcaccaccggccatgaagacgattatgcgttgtcgaggctggtcgacggatcttgtgcgcgcccaggtgggttttgcgctgcgcaaagaggcctgctgtgactgtatttcctgggcagctatggcgccgtcagtctcggtgtgtggacgtgtgaaggggaaggtagtcgcgtccagattgccctgaatctgatcttcaagcatctgcttgatagctaactcataccggctcaggctgagctcctctgattcgggtggtgggtttcgtcgggtgaaaaggggctgcactggtggcttttcatccttgagaggcttctcgatacgaactccaaggagttcgaggttggcaatcaccccgccgtcttttggcgggagtccagcatgcgccatgagtttgcgaatgtcaccacctaacaatccgccgcgatacatgatgtacaaaagtatgagtcgaagccgatctggttgtacgactgagtcgtcatcgaggagctgcacgagttgccctgctaggttctttgcctttttgtagttctcatccaggcccgtggcgaatgactgctcggtggagctcacttccaagagtttgcgggactggaagtagttcatacactcttgtgccatgttgaggtgcagcgtgtaggcacttttaccctcttggaactctgtcagtccgcccaacatatccttgatggtgttcacattagacttgtcgttactaaaatctcaagttagtggtccgtgtatagggatggcccgttgaaactcactcgtctgcaaactgagggtgcgctgctcggaatttggcaaagtcctcgcccagtttcccaagcacatccttcatatgcatatggcggtaggtcacccagactcgatcatgctcgccaatttccatctccttgacctcctcattttggtttccctggttcaaaaccgttttgtaggtaaccttgtctccatccgtgacaggaagaagatcatggaccatagcctggtatgtaaactcgtgaatgaggggcgcgaacaggtccatggaacggtctactacgagcagtacgcctcgggggcggtttgtttgaggcggaaagtcacgctgatgctgcgcgaactgatccaattcgttctgaatgaaacgcgccaagtgagaacacataactccagcctcgtgagtcggagatcggggccgatagtaccgaattatagggtattcgcctaaagaagcgcaaagagataccacctcgattcaacgtcagcaagcccaattggcatacacggatagcatcttaccttttgagccaattcttccaaatgaccccgaatcaaattgttgcaactcgggtggaagagcactgggaagctccacggatcccggaatgtgatcaaatgcgattctctggggtagaaattgatgttcatagtgtagaagtccgcaatgcgctcgcgcgctatttgggaccggtcaatccgagctcgctgctgcggatcgagggctataggctgtgtgagcggaatgacgtcgcaaaggcctcgggttcaccagcccactaacatgaagtccacaccaagaatgcctttctgtatcggcccacctcgaagtctgccatcagacagtcgaccacgtacgattccggggacaatatgtacaacgcgtccatatcgggattggacggtcgtcgatgttcgagctgctcgacgtctgcggtgtggcattagtgacatcgtttgggtcgcaaagcacaagacgagctcactggagacattgagattgagaatttcctcctccttcacagcaccgtagaccaatttcttgctggtctcatctaccaccaagactttccactattagggggagaatgccgtcaatatccgcggtagaggggttgatcgggggagggggggtgggctcacctcatcgccaccggaattgcggattgtgttcagtataactattccagacagttcaaggtcagccaaggttctttgcaagaggtagtagaagtagtcacccacagtcgcgttgaatgttaattatcgaggagcccatgctggcgggcagccctggggcttcagaatgaggattaggacaaaaaataaagaaaaagagaaaaaagataggcaatagtaaaggagattgacgagatgttcagttaaaggggaagagaggagtgtcaggtggccgtctgaggtatatgaagggaagatggttttccccaccattggagcttgaaagtggatcggctcgataagggaactttttggtttctcctatgcaggttcttgttctttatcctctctacctttctcttttttggcttcggttcaactgttcggccttctttgttcccaaattgttcctctctacgggattggagtccccgtcgtccaggaatgcagccatggactagcggtagtcgttccctctatgctttgcggcccttgactcgttttgctgtacggcccttcaccacaacctcgattctgcagcgctcgaaaaaggtcaaaacatcgccggacaggaaagcggacacaaaaaagggcaaaacacttgtggggaatcccgccgggagatccatccgacaggatattgcggccgcacgagatttcaacgaactcgtggaagcaaccctacgcgatgtatacagcaagttgaacaaatcaggcgaatcgatagaaggatggacccaatttgagcgccaaatcaaaaacgcctgcaaatcagatgataagaaagcctctgcacaatggggaccccttcggcatatcaaggtagcgctgcaaaaagcctacctggcatccggacttcagggtctgcgggaggaggtggaatacatgcagtattcggaaaacatcactgccaggttttcggcacccatcctggaagcacagcaagaagtggccgaccttcggtggccagccgagtggtatccgcgcgcacgatcgatgcagcgaacaatccatctccatgtcgggccgacgaattccggaaagacctaccatgcgctgcaacgactggcgaaaagcaagaacgggttttacgcaggtccgctgagattgctcgcacaagaagtatatcatcgattcaaggcagatggggttccatgcagtttagtcactggtgacgacgtcaaatttcccgaggatgatcaagtaccgcgtattaccagtaatactgtggaaatggtcagcctggggcaggaatacgatgttggcgtgatcgatgaaatccaaatgattgcgaactcatcaagaggatgggcatggactcgagccttccttggtgctcaggccaccgaactgcacctgtgcggcgaaacccgcgctataccattgattcgggagctatgtgcactcacgggagatactttggaggtccaccgctacgaacgcctgaacgccctggaagtgatgccacatagtctaaagggtaatctcaatagccttgaaaaaggcgactgtgtagtcgtattttctcggaaaggtatacacgctatgaaggcagacattgaaaagaccaccggaagacgcgcagccatcgtttatggtggtctgccggcggagattcggacccaacaggccaatctgttcaacgacccagacaatgactatgacttcctcgtagcaagtgacgcgattggcatgggtcttaatctgtaagttctgtgctccctggttatatttacgctaccatactaacccacgataggagctgcaagcgtgttatctttgacactctcgtcaagcgtgtcccgactggacttcaacggcttactgttcctgagatcaaacaaattggcgggcgtgctggtcgatatcgtccagccaatgccacggaaagcacaagtgaggagcctaacgtgggcctgatctcctgtctcgaagaggttgaccttccatatatccaacaggctttgaagttggagcccccaccgctgagtgcggcgggcatcttccctccagaatctgttttccggaaattcgccgcctatttcccaccaggtgtacctttcgaatatctgatcaagcgggtcctggacattgccaaggtcaaccctttgttcttcttgtgtgaccctagcagtcagttggagaacgccgagattatcgacactgtcaaaggactgccgtttgaggaccagttaaagttcatggtttctccaatggaccgtaaaagttcaggctcgcgtgatgttactggtgctatggcggactgcgtagccgaacaccatgaaggacgacttctagatatcgcccatctcaacctggaagttatcgagcagcccgtttctggcagcaacgactatttgcatgatctagaaagccttcatagggcagttatcttgtacctgtggctcagtttccgattcggtggtgtcttcactgaccgaactctggcaagtcatgtcaaggaacttgttgaagagcgcatggttcgggcattgaccgagttctctgccaacaagaggctgcggaagggtgcttctctgaagcgccagattgcgctgcagaaacagttgttggagcaggaacgtatgggagttgctggagactggatgaagccctctggtgagggagagcagattgaaatcaatctgcccgaagaaggtgcttcagaggctgcggaggctgcggaggttgcggagggtgaatcctctgacgccgaactctcattatttgaatcgtcaccggaggcagagggcgaggaagagggcaaggaagagggcaaggaagagagctcatcacccgactttgacgactcggagcctgaactaacagagtcatactatgacacagaagtccccaaagagtgatgaatatgtacaacaagaaatatgtatattagatgtataaaaccgatctccaatactcatacctaatacctatcaattatttctttttgctcaattgtacgtatttttcagcttgcattcacatattgattgaacatgttggaagactcccaataattactattacatctgcataaatggatgatgaagccttgccaagagacagggctacctcgggtgaacctagcgctcagctcaccgattttgtgccaaggatcgccttatcttatcggtggcaacttcggccatactaattttccgccatcaagatctccgaagagctacagggtagcagtgttttgcgcgctcgccaattttcacgttacttatccagttttgctggctctgtcttttatctggttggatctcttttgttccaccgcccatcatggatgacctcgagtctctggagctgttctcgctcgtctcgcgcgtgacgaacgagttcgagaaccatctgggaatcgccgacaagactctcgcagagttcgtgatcgatcagcacctcaaatgcaatggcaagttttctgaattcaagaaatttttcgacgacatgggcggcgaattcccgcagagtctcctggaaagtgtcgaccgcatggtgctcacgatgcaccccaaatacaaaggaaagaaagcggagaacggcaaaggagcttcagatgccaaagacgatatggatttgcttgatgctctggagcaaaaatctcgcgtgttcaagggccttgcggtccccgatacggagaagcgctgggaggaagaagactacacagatcctcaaggcgcagacgaggccgatgcacaggcaggcgcgatggacgacacttttgccatgctcgagggactggcaggaaaagcgaaggaggacaaaccgcatgcgccgagaaacgatcgcggaactaggaagcggagccgcagccccgagaacaacgattacgaccgtggacggcgcagagacaaataccgctcgcgatcaaggtctcgaagcgccccggggtataacaaaaacgatgatcttgtggacgagttcgggagatcgattaggaaatatggccgggaagacagccgtcgcaatggccatagtgaccatcggagacaccgtggtcgcgacgaggataatgatttccgtcgtcctccgcctatcgagctggatgaccatcccgttcttttcaaggtctatgatggaaccgtgacaggtgtaaaagatttcggtgcttttgtgaatctaaagggcgtcagggggaaggtggatggtcttgttcatgtttcagcaatgcaagaaggagcacgagtgaatcatccttcggatttggtctcgcgcggacaaccagtcaaagtcaaagtggctagtatcgaaggcactcgcatcggactgtccatgaaggaggtggatcaagtgacaggcatggatcttgttccccagaagcgccttgcttctggtgcaaatatggaacgcctcgatggtggattcatagatgacaagtacggcagcctcggatccgatgtgcccgttattgaagggtctggaggtcgaccaatgaggaaccgaaagcgcatgacttcgccagagcgatgggagattagacaattgattgcctccggggttgcctctgcagcagattatcccgacatcgacgaggaatataatgcaacgctcaccggcgaaggcactttcgaagaggaggaagatatcgacattgaggtcaaagatgaggagcctcctttcttggctggccagacgaagcaatccctcgaactttctcctattcgtgttgtcaaggcccccgatggctcaatgaatcgttctgccatggcaggcactaaccttgccaaggagagacgcgaactaaagcagcaggaagctcaagacaaggcggctgagaaggcggcagatgttgatctcaatgctcaatggcaggaccccatggttgcaccggaagagcgaaagtttgctgctgatcttcggagtgcccagcaacccaagcaggacgaggctgtaccggagtggaagagagtgacgatgggcaaaaacgcatcgtttggaaagcggacaaccatgtccatgaaacaacaacgcgagagtcttccagtctacaagttccgaaagcaattgctggatgcagtgaaggacaatcaaatgatgattgtcgtcggagatacaggttctggaaaaaccacgcaattgacacagtacctggccgagggcggatatggaaacaccggaatgattggttgcacccagcctcgccgtgttgctgccatgtcagttgctaaacgtgtagctgaggaagttggttgcaagctcggagcagaagttggatataccatccgtttcgaggattgtactagcccagacaccaagatcaaatacatgaccgacggaatgcttcagagagaaattcttttggatccagacctcaagagatattccgttatcatgctcgacgaagcgcacgagcggacaatcgcgactgatatcctgttcggactgttgaaaaagacagtcaaacgaagaccagatctcagattgattatcacctctgccacactggacgctgaaaagttctccgaatacttccacggctgtcccattttctccattcccggtcgaactttccctgtcgaagtcatgtactccaaggagcccgaatctgattatctagatgccgcactcatcactgtcatgcaaattcacttgacagaaccgcaaggtgacattctgctcttcttaacgggccaagaagagattgatacagcatgtgagatcttattcgagcgcatgaaagctttgggacctactgtccctgaactggttgtcttacctgtttactctgcactacccagtgagatgcagagtaggattttcgacccggcacctccaggcggacgtaaagttgttattgcaaccaatattgctgagacctcgatcacaattgatcagatttactacgtcattgatcccggttttgtgaagcagaatgcctacgatccgaagctcggcatggattctcttgtggtgactccaatttctcaagcgcaagctaagcaaagagctggccgtgccggaagaacgggacctggaaagtgcttccgattgtatacagaggctgcctatcagtctgaaatgcttccaacaaccattcccgaaattcagcgtcagaacctctctcacaccattctcatgctcaaggccatgggtatcaacgacctcctccacttcgatttcatggacccaccgcctaccaacacaatgttgacagcactcgaagaattatatgccttgtcagcacttgatgatgagggtcttttgactcgacttggacgaaagatggccgatttcccaatggaacctgcgcttgcgaaggtgctcattgcatccgtggattcaggctgctccgatgaaatgcttagcattgttgccatgctatcaatccagtctgtcttctaccgccccaaagaaaagcagcaacaagcagaccagaaaaagtccaaattccacgatccccacggcgatcatctaaccctcctcaatgtctacaatgggtggaagaacgcaggcttcaacaactcctggtgtttcgagaacttcatccaagcacgacagatcaagcgcgcccaagatgtgcgccagcaactactaggcatcatgaaccgttacaagcaccggatcgtctcttgtggccgagataccatgaaagtgcggcagtctctatgtaccggcttcttccgcaacgcagcacggaaagacccccaggaaggatacaagaccctggtggaaggaacgcccgtgtacatgcaccctagttccgcgatgttcggcaaaccggccgagcatgtcatctaccacaccctggtcctcacaaccaaggaatacatgcactgcaccactgctattgagccgaaatggctcgtggaagcggcgcctactttcttcaaggttgcacctacggatcgattgtcaaaacgtaagaaggcagagcgcatccagcctctgcacaaccgctttgctggcgaagacgattggcgtatctctgcccagcgacgccaaggcagaggtggtggtggtggaacttggggttgatttttgttatgtttccaatataccagctatgcttgcaaccgtgtgttattttctgtcttgcgtcttatatctctctatcattgtatttttgcatgaatcacttagcttaaaatatcggagttggttttttttcgatctgggaataatttactggttgtgcattaaggtggcagtttgaaagaatatcctacttgcaaagagcatttgtcgtaaatatgtcaaaacctcctcctatctggtgcagagtatcgcagtgcaattactcgggactttggtattttctctagtcaactcggagcaatatagaataatttttcctacgaatgagattgaatggtaagtgaccaaatgttttagaatcagtttcaagcccgtttgacactcctagatacacgagttcatatccttcgcaacaacccagtcatcactcaaagtggaattcgtctggtcatgtcagtaggttcccaggagcagtatagttgtcaaatagtcttctagcctacacattcttcctcatttccatgcttgagaacttcgggtgcagtgccagcagtggttgttttggtgttattgctcttatacgcgtcaattgtccagcctctgactttcgtgattgcgttaagctggcgcgtgagggtctttttacggtggacgtccattgccataatcttgcactggatctgttccttaagcgtctccattcgagatgtctttctcatcctctcctggcacaatccaatccatttatgagaagctgcgttggtcatctcgctgtccaggaccgcgatctccttgacaaggtcgttcagctcggccatttgggctttgatgacatcgctggtgttgtatttcaccatggtgaaaacaatagtaacgatgcagagtaaaagtcgtgaagaggaggataattagaggaagaagaggatgaggtgatagaaaagttagtagggatggaaagaagtgaatagaagaattgaatggtataaatagcccaagaagctgttttccagttggcaggatgggatgggacgcgtcttagaaatatatcaaatcatcataaggaagtgcacaccaaaattcaggatcaatatgtggtagcaagagatgagcaatgcacgattacttgctataaaataaagaacgaggttcgtaatatacgttgtcacgcacctactctacctgagatggcttgcgaacaagaaaatacatcaccattggctccgttccaccataatgcgaataatccaccgataccgtatctaccagtcgaaagccaaggctaagatatagcttcaatgcagccggttctgacatcacataggtctttattccttgtcgacctacaactcgctttgcacgagcattctcccgatgcctcggcgccagaaagaagggtctgtcgtcaaataatcaagagctggggagtactatctatcagttatcagcctgctagtgatatatcggtgtgcattttactcagaaatggtccatctggcataattcgaggggctgcttcttcgaggggtgcactgcaataacgcatcatctcccggtccttcaagcctataggccgtccactccgggtgttcgatcgatactgtttctcatagactgcgcgatcggcggaagtcccttcggctgcctgtgcctccaaccaaatatcgcccttctttgtgagaattggacatcaaatactcgatctagccccttttagccattgtggccaaactgattgctcggaagccatgcagtatataagatgataatgatcggtatcaaacacaaaaatcaacagctttccatctttgccaatgccgtatgacttcgataagcaccgataacctcggaattggggtgaaataagacgaacaagtcaagaatcaaacgcaagaaagagggttgtatgcatcgggggccattcatatcgccgataatagtagaacaagtgtcattaccatacagagcactctctagcagcctggctaagcttttatttcaacatcatattaaggaatggaccacatacacatgcacttggtaaaatgatgtaaatgatgttgtctccacttattggaggctaactacacaccgcctcggtattaatatggcagaataaggcggtgtatccacacttttgtaccgggcggggaggcctcggccaatcaacgagctggaaatgtcgatggtatcggagaacatctgaagataaaaaaaaaaaagttacaacaccaacccatcaaatcatgtcgcacatcacagaacatccctctcgggcgaagagaagaaagattgacgatcctaaaccggagaaaacggccgtcatatccaatatcaaatctgctgcttcgttgcgtgaattgttggctgtccagcaaaatgccccgttggcaaagcaaggtgaggcaggtcgcaaaccatcctaagctacaacaaaactgactagcaaataggtataatcaagtttaaagagttcttggtgtcaattgcacacacggaaaatgagagcgaaaaggcagagaaattgcgtgtcctcaaggattattgcgataaacagatcaccaactccggaaaggaggatgaaacctcagtgtgctttgcggatataattcaatcttggtcctttggcgatggcaataacaacgagcctttactcactagcgtcccttctgttcttgcgatcttcctcaagacgatctcgtcggaactggagttccgggaatttggaatcgccctgtgcaagcatttgctacagaaagaccagctgagattgttcaaccgcggtctgacagcaaccaagtctaaagagcacttgatctcaccgtgcctgcgtttgcttacggagatcgtgacttttgacggaggagcagtggcacgacagctgtatcttcggcgctacattacctttaagcgactggaggtcttcctggcccctaacaaagcacaggagatctcaggagatgagtcccacaagtcgacgctcagacgcaacgctcaacgatacctgctcgcaaacctgagagtccagcatgcctccgagaagggtgatatcatcgaacagcacaagattaccaggtctttccttgaatatatccggaaggatccgcgggatactgtattagaaattatcaaggctatcgaaagggacgtggtacaagattccgctctgtcccgcaaatcgaagagcaagtttttcaacagacataatctcgaacgactggtgacgctttatggctatgatcgagagtcagatgaacctaatgctggaggtgtcgttatcgccaatgagatccaccgagtcatgatgaatgtgtgcaaaaccgccgggctcggtgtcctcttgcccgagaccggctggtatcccgtcggaaccgatccagagaccttacccgttgatgatgatacatgcattgaattaggccttgattctcccatatacgtggacaaataccgagagtctatccccgtgcgaaatggttccctttcattcctcattcagtgccttcggcctgatgtggatagtctccagattgaactgctggtttccatcttcagggttgcaccagagcttgttgccgattatttctcaagaaaaactatgtttatttcagacccaaaggccaccccttcgtggatggccgagtcggccttccttttttcaaccgtgcagttgcctgtccctgcaaactgtggctggaaggataaacagcctatcctgccaccgccggtctctgtcgttattgaaaatattctccctcgtccccttggccagaagatcatgacccgctgcctcaaccagaatgcggagatcatcaccttgttcgccgtgcgtatcctgactctcgcattcactaagctgcgggctgtcctcaaaatcttccaggcggatcacggccaaggccaactattctggaatcaggcttctgctaagctgctggcagagttctcccgccgatgccctgctgtcaaggatgtcgttgtcctcttccgaagaacagaaagggaggacctgacccagcaggaggctgttgcagagcttttgacctgttactatgaagtgatgccggacattgctctagaggaaaactttgacgtctccctagttttggtggatgttctcaagcgcctggaagccccagacattagcgcggatgattctgaatcgcttttgagccaacttcagagtatcctccagatcgcacaacaatcagcttcattgcgttggtggcaaaagccagcatccatgcaatactcacccttcacctcgattctcaaggttctcatggatacttcagataaagattcttcgcggcgtatctctactctgttcaagactgttctggttgataactctgttctgcaaagctccccacacgcatttgcatctgtcttatcaagccttgagaattccgaggctgatgctttgcatcagcagctggtcttttttgataactgtgtctcccgtgttgccaagaagccagttcactaccaggacttgctacagtcattatccgaggatgtgtctagaactactagcgcgcttgttgctgccattgttgagcaatggccatttgtcgtcaaaggcggagatgcatctacggaagctgccgttggtgcctggatcgcaagtcttctcggtaatctgaagcaggcgggtgagagtaccaaggtacttaaagctgctcgggatgcgttggttgaagcaactgagaccaaaaagatcaagtctcttctcaagaagtccgtgaaagaggcagatgatgccgacaacgaagacaagatggacattgactctggctctaacgtgcctagttcatccaacaaggcctctgccgttgacctcgatgagatctttggatccctgcccactgaaggcacgacccacaatgccctgaacaaatgggaaagagaggacattgcagaagcagtagaccagggtcatgtcgccgagttgatgctctgcatttgttctcagcacgaagaagtccggagacaggccttcgccaacattattcgcttcatggccaaactcaaggattctacctatgcagaatggcgcacagtgtttactctagctggcgagctcctcgagacagtcaacaacattggcatggagaagcccgttccctggattgtgggcgagtgcgcttcaaactgcctggaggttctcatagaccccctccacaaggtctacggaaaagtcaacaagttcctgcagaaggcaccattatgggaagtcgagaagatcccaacatactgggtcgataaaatcctcttgcacgaacctgagttggatgatgggtatttcgacgagatcgactggctcctaaatctatttatcaaggcactccgcaccgaggctgtaagtttctacctttcagttctatactccaaaagcacgattgctaacacattgaatctaggatatggaggtttaccgacgagctaatgtcttcgaacgcattctttccctctaccagtccccaaccctcggcccagcagctcgacgaaagatcctgcacattgtataccgcgctgcccaggtgggtggcagtactaccctgatcactcgttctggtgtcatcagttggatccagatccaagccgcagaggctgatacgaaggaggctgctcagcttgcagcacttgcacgtgctttgtatgagacgtgtgaccgggagcgggttgatgactggagtaatggaactcttgggcgggtcgttgatgagatccaggcgcaagactgaggtgttggaatttgtacaatagcagatcgtttggatgattggcgttcttgcctttctgaacatatgtagtacggcagtctaccgccagtccgatagtaaaatttgacctggctcaccggattcttattgcctacatcctccttcacactatattatatggcaaaaacaaaaccaaaaacatacagcagtatgtttaaggtggtggtggtcacggttcgggcatccgacaaagagagaattcttggcgcaggccgttaacgtgcactcatggtgtccaaatcaaattaaataggatcacacgtcaagtctggttgtgctgtatctaccattccctcttcaagcccataaaatccttatcctcggtcacagcatcgcccgctttctcaaacaccctgagaatctgagagttcctctccttaacgttacttaacataatgtcaattgccttcgcggcctgctctccaagaaccatctcatctgcttttgatgcttcatcggcaatctcatgtaaccgcttaagccagtataaccatctccagggactaaatcctccaggtgcccgttgacctagctccgactggacaaaggtgaagccacctgccccaaaggtagtatcggagcaatcattccatgagacatcggataagagtatgatgttatgcccggcttctcagatccaggcacatgcagatgggagtaacgacgcaatagaacgtccaggcattgttcggcgatattcttcgtgttcatcatccggctcattagagctcccaagaggacgctcgcactcgaatgtgtcccgaaaaaggatcagagcaatctggcaaagccgatcgttcgcaatgcgcgtggacgcaagcttcgcaaggaaggacgcagcattaaggcgctgctttgcgttcatttccgcgcagtcgttgatccagcactctgtcatgtccgtcgcaaggaacggcatgtcgttccagactgtcccatcgagagttctagcaatatcgatgccaccgcccggcgccggtctgattagaggcccgcgtccccgcgtccggaggatgtcgaggacccatctgtcttgctcaaagctttcgtgggagacatgcctggcgcattggtaatagacgcaccagagagaatgcagagacgtctcgcaggaatcaattgacgcccggctctggcaatagctcaggcccgtgatccatactctgttatatgccaccgattggaggaggtcgaaattccctgctcgtgcagcttcctccaactccgcccgatccgctcggctgcatgcagcgaagccgccagagctagctcgcggtactgagctcggtgaatctcttagtaaatcgtgcatcctaagttcaggaatttaaagagctggcagtaccgattggtgatgagtgtcaagagggtgaatctctagaaatgagttaaacgtaggagaggtagagtgcaatgggattagacaatatattatttatataaaaaaaaaaggctgactgtataaagaaaatgagaagtctctgtggcagacagcaacaatcttttgcttccaatcagacccgtatgccatttgtgatataccattatatgccattagtgacacgtcgctgtttagggtaggagacccactggggatcagaaaaagatcagcaggcgtgttcatgacccgatatttggggctagatacgctgactatctcggggaatccagcagagttgaaatgacggagtacaatgatgcgaattatagaaatcgaggtaacagttcacactcaatgctggtatagtgtagaaaacaggacaacatatattgaaatgcagcaaacttgtatatgttcctctacagtagctgctccacgatcaccgagtaccaacacggaaatatccgccttgggaagtcacgacattctgacagatacactttctactaaaagaatcaaaataacatgctttactctcaactgtgtcggtgcactgtgcgtagaagttagtatactcctggagcaatggggtcgagggcaaattacctttttgacctcgcaaccacagatagcgttcagcccactatgagttctataatggcattggttggtttccggatagcactcctagtttgaaaagatcaggcccttcgtctcgtacctcaatgaaccttggagatttactcctcggtactgaatctggcgattgttttcatttctggcatccaagtcatttgatgtaggagatctagggctcgctgggctggctaatgcgcccagagcagcagagagggcaagtccagaagacataaaggtaaaagctttcatgacgacggcgtgcacctttggttacttaagaagcaacaggactgatgttttcgaaaagggatttgtgttctcatctaactctggtatatcgggtctgtagtcatcttatatagactcgattccaacccacagtgggagatcttagataggacaatagtcgaaggtctacggctgggtagcaaactcgcaacaatagtaaggtacatgggaacatttaggccattacactaggccaagcgtccctccaaagaaggaatgtgctgcatcaaccaattgcttaaggctagttatgttgttacctgattgtctacaggcgaagtccgcagtggactacaataaagaaaatacatggtctcagtggatatcccctgttggcatcttactggcggacagccaagcgggtaatacacccgtgcattagtgttgtctcaagattgcggcggctcgctggaccctgggagatcgtcgctcgcgctaagctagaaatttacgcccgtgtatgggtattgtcttaaggggattgcggcatagttagcctcgaccgacgctaagcttatagacaatgacaatagtatctatgataaccgtatggtcattgaatcgagtactagtattaatgttcgaagtcatgtgacctctctccgctcccaacaactatgttagtcccagcagataggtagtttccttttctctcttcacgcaattcataagaactttccagagtatctatatttcatccgtagactccttgatttatctctaataggttataagccctcgttcttgaagctactgtatcactgtaagcttcaatctcttttatcctcctattggtgctagcgttgtaccaccctatactagaattcctttttcgcgaattggaatcctaaccggctgagactaacatcctaaccatagttattatactctataatagtgtacttctattactctaattagttgactgttaaccttgctggccgttcgatactctgatttgtcgactattatattcctgactgttcttaaaaatctaagttaatctactgccttaagtagtagatcgctatcctctagcctaaaattttagggaataccgaattaacgacccctaagggctctctatctcttaaccctatcgttagagggttgcctctctttgaagctttatagctatctcttagagattcgactcttaattgtaaaccatttttttctcttaataattaggctattgatagtaagatactagtttcccttaatatatcttcgatttttaaatataactttaagcgttataataaatccgatattaattagactatttgacggaaaaacggtggtaaggcgagtgtattttgtggcagaaaaatcttaataaattctctaactctctaaaactgacaatagtcctaaaacatgacaatctgatggacaacttagtaatcaaaacaaacaaaacaannnnnnnnnnnnnnnnnnnnnnnnnnnnnnnnnnnnnnnnnnnnnnnnnnnnnnnnnnnnnnnnnnnnnnnnnnnnnnnnnnnnnnnnnnnnnnnnnnnnnnnnnnnnnnnnnnnnnnnnnnnnnnnnnnnnnnnnnnnnnnnnnnnnnnnnnnnnnnnnnnnnnnnnnnnnnnnnnnnnnnnnnnnnnnnnnnnnnnnnnnnnnnnnnnnnnnnnnnnnnnnnnnnnnnnnnnnnnnnnnnnnnnnnnnnnnnnnnnnnnnnnnnnnnnnnnnnnnnnnnnnnnnnnnnnnnnnnnnnnnnnnnnnnnnnnnnnnnnnnnnnnnnnnnnnnnnnnnnnnnnnnnnnnnnnnnnnnnnnnnnnnnnnnnnnnnnnnnnnnnnnnnnnnnnnnnnnnnnnnnnnnnnnnnnnnnnnnnnnnnnnnnnnnnnnnnnnnnnnnnnnnnnnnnnnnnnnnnnnnnnnnnnnnnnnnnnnnnnnnnnnnnnnnnnnnnnnnnnnnnnnnnnnnnnnnnnnnnnnnnnnnnnnnnnnnnnnnnnnnnnnnnnnnnnnnnnnnnnnnnnnnnnnnnnnnnnnnnnnnnnnnnnnnnnnnnnnnnnnnnnnnnnnnnnnnnnnnnnnnnnnnnnnnnnnnnnnnnnnnnnnnnnnnnnnnnnnnnnnnnnnnnnnnnnnnnnnnnnnnnnnnnnnnnnnnnnnnnnnnnnnnnnnnnnnnnnnnnnnnnnnnnnnnnnnnnnnnnnnnnnnnnnnnnnnnnnnnnnnnnnnnnnnnnnnnnnnnnnnnnnnnnnnnnnnnnnnnnnnnnnnnnnnnnnnnnnnnnnnnnnnnnnnnnnnnnnnnnnnnnnnnnnnnnnnnnnnnnnnnnnnnnnnnnnnnnnnnnnnnnnnnnnnnnnnnnnnnnnnnnnnnnnnnnnnnnnnnnnnnnnnnnnnnnnnnnnnnnnnnnnnnnnnnnnnnnnnnnnnnnnnnnnnnnnnnnnnnnnnnnnnnnnnnnnnnnnnnnnnnnnnnnnnnnnnnnnnnnnnnnnnnnnnnnnnnnnnnnnnnnnnnnnnnnnnnnnnnnnnnnnnnnnnnnnnnnnnnnnnnnnnnnnnnnnnnnnnnnnnnnnnnnnnnnnnnnnnnnnnnnnnnnnnnnnnnnnnnnnnnnnnnnnnnnnnnnnnnnnnnnnnnnnnnnnnnnnnnnnnnnnnnnnnnnnnnnnnnnnnnnnnnnnnnnnnnnnnnnnnnnnnnnnnnnnnnnnnnnnnnnnnnnnnnnnnnnnnnnnnnnnnnnnnnnnnnnnnnnnnnnnnnnnnnnnnnnnnnnnnnnnnnnnnnnnnnnnnnnnnnnnnnnnnnnnnnnnnnnnnnnnnnnnnnnnnnnnnnnnnnnnnnnnnnnnnnnnnnnnnnnnnnnnnnnnnnnnnnnnnnnnnnnnnnnnnnnnnnnnnnnnnnnnnnnnnnnnnnnnnnnnnnnnnnnnnnnnnnnnnnnnnnnnnnnnnnnnnnnnnnnnnnnnnnnnnnnnnnnnnnnnnnnnnnnnnnnnnnnnnnnnnnnnnnnnnnnnnnnnnnnnnnnnnnnnnnnnnnnnnnnnnnnnnnnnnnnnnnnnnnnnnnnnnnnnnnnnnnnnnnnnnnnnnnnnnnnnnnnnnnnnnnnnnnnnnnnnnnnnnnnnnnnnnnnnnnnnnnnnnnnnnnnnnnnnnnnnnnnnnnnnnnnnnnnnnnnnnnnnnnnnnnnnnnnnnnnnnnnnnnnnnnnnnnnnnnnnnnnnnnnnnnnnnnnnnnnnnnnnnnnnnnnnnnnnnnnnnnnnnnnnnnnnnnnnnnnnnnnnnnnnnnnnnnnnnnnnnnnnnnnnnnnnnnnnnnnnnnnnnnnnnnnnnnnnnnnnnnnnnnnnnnnnnnnnnnnnnnnnnnnnnnnnnnnnnnnnnnnnnnnnnnnnnnnnnnnnnnnnnnnnnnnnnnnnnnnnnnnnnnnnnnnnnnnnnnnnnnnnnnnnnnnnnnnnnnnnnnnnnnnnnnnnnnnnnnnnnnnnnnnnnnnnnnnnnnnnnnnnnnnnnnnnnnnnnnnnnnnnnnnnnnnnnnnnnnnnnnnnnnnnnnnnnnnnnnnnnnnnnnnnnnnnnnnnnnnnnnnnnnnnnnnnnnnnnnnnnnnnnnnnnnnnnnnnnnnnnnnnnnnnnnnnnnnnnnnnnnnnnnnnnnnnnnnnnnnnnnnnnnnnnnnnnnnnnnnnnnnnnnnnnnnnnnnnnnnnnnnnnnnnnnnnnnnnnnnnnnnnnnnnnnnnnnnnnnnnnnnnnnnnnnnnnnnnnnnnnnnnnnnnnnnnnnnnnnnnnnnnnnnnnnnnnnnnnnnnnnnnnnnnnnnnnnnnnnnnnnnnnnnnnnnnnnnnnnnnnnnnnnnnnnnnnnnnnnnnnnnnnnnnnnnnnnnnnnnnnnnnnnnnnnnnnnnnnnnnnnnnnnnnnnnnnnnnnnnnnnnnnnnnnnnnnnnnnnnnnnnnnnnnnnnnnnnnnnnnnnnnnnnnnnnnnnnnnnnnnnnnnnnnnnnnnnnnnnnnnnnnnnnnnnnnnnnnnnnnnnnnnnnnnnnnnnnnnnnnnnnnnnnnnnnnnnnnnnnnnnnnnnnnnnnnnnnnnnnnnnnnnnnnnnnnnnnnnnnnnnnnnnnnnnnnnnnnnnnnnnnnnnnnnnnnnnnnnnnnnnnnnnnnnnnnnnnnnnnnnnnnnnnnnnnnnnnnnnnnnnnnnnnnnnnnnnnnnnnnnnnnnnnnnnnnnnnnnnnnnnnnnnnnnnnnnnnnnnnnnnnnnnnnnnnnnnnnnnnnnnnnnnnnnnnnnnnnnnnnnnnnnnnnnnnnnnnnnnnnnnnnnnnnnnnnnnnnnnnnnnnnnnnnnnnnnnnnnnnnnnnnnnnnnnnnnnnnnnnnnnnnnnnnnnnnnnnnnnnnnnnnnnnnnnnnnnnnnnnnnnnnnnnnnnnnnnnnnnnnnnnnnnnnnnnnnnnnnnnnnnnnnnnnnnnnnnnnnnnnnnnnnnnnnnnnnnnnnnnnnnnnnnnnnnnnnnnnnnnnnnnnnnnnnnnnnnnnnnnnnnnnnnnnnnnnnnnnnnnnnnnnnnnnnnnnnnnnnnnnnnnnnnnnnnnnnnnnnnnnnnnnnnnnnnnnnnnnnnnnnnnnnnnnnnnnnnnnnnnnnnnnnnnnnnnnnnnnnnnnnnnnnnnnnnnnnnnnnnnnnnnnnnnnnnnnnnnnnnnnnnnnnnnnnnnnnnnnnnnnnnnnnnnnnnnnnnnnnnnnnnnnnnnnnnnnnnnnnnnnnnnnnnnnnnnnnnnnnnnnnnnnnnnnnnnnnnnnnnnnnnnnnnnnnnnnnnnnnnnnnnnnnnnnnnnnnnnnnnnnnnnnnnnnnnnnnnnnnnnnnnnnnnnnnnnnnnnnnnnnnnnnnnnnnnnnnnnnnnnnnnnnnnnnnnnnnnnnnnnnnnnnnnnnnnnnnnnnnnnnnnnnnnnnnnnnnnnnnnnnnnnnnnnnnnnnnnnnnnnnnnnnnnnnnnnnnnnnnnnnnnnnnnnnnnnnnnnnnnnnnnnnnnnnnnnnnnnnnnnnnnnnnnnnnnnnnnnnnnnnnnnnnnnnnnnnnnnnnnnnnnnnnnnnnnnnnnnnnnnnnnnnnnnnnnnnnnnnnnnnnnnnnnnnnnnnnnnnnnnnnnnnnnnnnnnnnnnnnnnnnnnnnnnnnnnnnnnnnnnnnnnnnnnnnnnnnnnnnnnnnnnnnnnnnnnnnnnnnnnnnnnnnnnnnnnnnnnnnnnnnnnnnnnnnnnnnnnnnnnnnnnnnnnnnnnnnnnnnnnnnnnnnnnnnnnnnnnnnnnnnnnnnnnnnnnnnnnnnnnnnnnnnnnnnnnnnnnnnnnnnnnnnnnnnnnnnnnnnnnnnnnnnnnnnnnnnnnnnnnnnnnnnnnnnnnnnnnnnnnnnnnnnnnnnnnnnnnnnnnnnnnnnnnnnnnnnnnnnnnnnnnnnnnnnnnnnnnnnnnnnnnnnnnnnnnnnnnnnnnnnnnnnnnnnnnnnnnnnnnnnnnnnnnnnnnnnnnnnnnnnnnnnnnnnnnnnnnnnnnnnnnnnnnnnnnnnnnnnnnnnnnnnnnnnnnnnnnnnnnnnnnnnnnnnnnnnnnnnnnnnnnnnnnnnnnnnnnnnnnnnnnnnnnnnnnnnnnnnnnnnnnnnnnnnnnnnnnnnnnnnnnnnnnnnnnnnnnnnnnnnnnnnnnnnnnnnnnnnnnnnnnnnnnnnnnnnnnnnnnnnnnnnnnnnnnnnnnnnnnnnnnnnnnnnnnnnnnnnnnnnnnnnnnnnnnnnnnnnnnnnnnnnnnnnnnnnnnnnnnnnnnnnnnnnnnnnnnnnnnnnnnnnnnnnnnnnnnnnnnnnnnnnnnnnnnnnnnnnnnnnnnnnnnnnnnnnnnnnnnnnnnnnnnnnnnnnnnnnnnnnnnnnnnnnnnnnnnnnnnnnnnnnnnnnnnnnnnnnnnnnnnnnnnnnnnnnnnnnnnnnnnnnnnnnnnnnnnnnnnnnnnnnnnnnnnnnnnnnnnnnnnnnnnnnnnnnnnnnnnnnnnnnnnnnnnnnnnnnnnnnnnnnnnnnnnnnnnnnnnnnnnnnnnnnnnnnnnnnnnnnnnnnnnnnnnnnnnnnnnnnnnnnnnnnnnnnnnnnnnnnnnnnnnnnnnnnnnnnnnnnnnnnnnnnnnnnnnnnnnnnnnnnnnnnnnnnnnnnnnnnnnnnnnnnnnnnnnnnnnnnnnnnnnnnnnnnnnnnnnnnnnnnnnnnnnnnnnnnnnnnnnnnnnnnnnnnnnnnnnnnnnnnnnnnnnnnnnnnnnnnnnnnnnnnnnnnnnnnnnnnnnnnnnnnnnnnnnnnnnnnnnnnnnnnnnnnnnnnnnnnnnnnnnnnnnnnnnnnnnnnnnnnnnnnnnnnnnnnnnnnnnnnnnnnnnnnnnnnnnnnnnnnnnnnnnnnnnnnnnnnnnnnnnnnnnnnnnnnnnnnnnnnnnnnnnnnnnnnnnnnnnnnnnnnnnnnnnnnnnnnnnnnnnnnnnnnnnnnnnnnnnnnnnnnnnnnnnnnnnnnnnnnnnnnnnnnnnnnnnnnnnnnnnnnnnnnnnnnnnnnnnnnnnnnnnnnnnnnnnnnnnnnnnnnnnnnnnnnnnnnnnnnnnnnnnnnnnnnnnnnnnnnnnnnnnnnnnnnnnnnnnnnnnnnnnnnnnnnnnnnnnnnnnnnnnnnnnnnnnnnnnnnnnnnnnnnnnnnnnnnnnnnnnnnnnnnnnnnnnnnnnnnnnnnnnnnnnnnnnnnnnnnnnnnnnnnnnnnnnnnnnnnnnnnnnnnnnnnnnnnnnnnnnnnnnnnnnnnnnnnnnnnnnnnnnnnnnnnnnnnnnnnnnnnnnnnnnnnnnnnnnnnnnnnnnnnnnnnnnnnnnnnnnnnnnnnnnnnnnnnnnnnnnnnnnnnnnnnnnnnnnnnnnnnnnnnnnnnnnnnnnnnnnnnnnnnnnnnnnnnnnnnnnnnnnnnnnnnnnnnnnnnnnnnnnnnnnnnnnnnnnnnnnnnnnnnnnnnnnnnnnnnnnnnnnnnnnnnnnnnnnnnnnnnnnnnnnnnnnnnnnnnnnnnnnnnnnnnnnnnnnnnnnnnnnnnnnnnnnnnnnnnnnnnnnnnnnnnnnnnnnnnnnnnnnnnnnnnnnnnnnnnnnnnnnnnnnnnnnnnnnnnnnnnnnnnnnnnnnnnnnnnnnnnnnnnnnnnnnnnnnnnnnnnnnnnnnnnnnnnnnnnnnnnnnnnnnnnnnnnnnnnnnnnnnnnnnnnnnnnnnnnnnnnnnnnnnnnnagtcacgtgatccaactgtatcagggatgaaaaatgacagtattcatcctagattctgacactattcctaaacttaagggagaaagtaactttgctatatagtagtactgtctatatatagccttaaaggaaaataataaggtatatattaaaattatcttagaagataatataaagcctttctatcctaactaccttaactatagtaaaaatgttattcgttagctagctcttattaaagttagcggtaagatagaactaattactccgcttattataaaggaaatggttaaggaacgataaaacgaaaataaaaagctatataatacctattaaaaggaacttaataaataggattagtataatacttaagcctataatcttatttttagtacccttaatctaatcctagcttcttatattaagtagactaatattacgcgagaaattatttagatccttataagagaatatagtatactattatagtagactaactttaaatacttcgaaaccctctgtaatctttagtataagggaaataatccttaggaatttattcgctagtttaaggaagtactctttaagatttactaaaagagatcctctttagatcctataataacccttaatttttttatctatactatttagagtaatcctcgctattaggtatttatttaatccttaaaacctgatcttagtaatcactattttatagtagatatctattataagtttatccttatagaaggatctataaaaattgctagtagaggctacttaagctataatccttctataaatataatatctacttaaaaggatagtttatcctactctaattctaataataagaagaaggataataagaagggatagaataataataaaaagggatctttaaataataataataattctaataataatttttccgataaaaagctaaagaagaagtaatagtataaaaaagaggaggatattattttatatactatttataatactcttagaaatcactacttaagaaactgccctttaaggaataagtaaagagtagtgaatataatttattatacctaaccttagtagtttacttaataattaatctaataagtccctattctataacccggttagattattagctaagtagatacttaaggatagattatccctatttagtaatactagtaatagccttaactaggagtaaatatagtttatactctatatatagccctatctagtttatagtaaggacccccttctagtaacccctttaatagatataataacctatttactaatatactattctaagtaaatactacttatagttcctattctatttctaaggaaggataggctgtaagtaataataataatatttcttactagataattgacttaggtataagtacttatataaccccttattagttagtctttattaattttagataatatatattccttatcttaatagtaattagtaaagtcttttatatagaaggatatagagatattattctctaacttcttaattataatataactaattatctagtctctcttactctttaaaaagtttggcttatactagaacttaagtctagccttatttctatatctactcttaataaagtagatattagtacctaggtaaagaatagtattataatatttaagtactaagatacttatagttctcttaagttaattattagttatatactctataaaggagaatattactagctaaattattatagtattctacaggacggcaagcggggcgccagaaatggctcccattgccccgttttcccgccactcccgaccgcctgcccggctccgccatccccctgccccttccggcatggcgtccactgcgaccgcccaaccaggtttagcgccaccgaggccgcttttattgcccgacgcatccgttcctccctctataaaagaccactcgccctcttgtcaagtctcccacgcactttcactctccttgcccacccgaccccctttcttctcgcccccaccgaccccctttcttctcgcccccaccgacctacaacgcattggactcatcatcctgacgcactgccccttccgtttcaccggagatgccgctgcttccgatcctcagaccgttctggccagcatgggcgacgacgcgacctcaacgcccaggggcatcggctccgaattgatcagtcctcagtggatttttgaccaatattgattacaacagagcgacaggtgctctttgctacacaaattatccagatcgcttcccaccagaactcattgcacatcgagcctgtgctatctatcctcttccgccgacctcgtacgcctccatgaagtctccgaatgacatctttgatgacatattccccgcttccatctgctccttcgaggttacattgcacagctctcgtccctgatatactagcgtatgcttgctcacgactgccaagcgttcttttggcgtcatcaatagctcttttgggacccgatgcacacagccgagaaatcttcgactacacagcttggtatcatgagccaatagcgaaaatccctcagctgcacctgactcctgagctagcgattgcagccagaggcggatgactctattggacggacaatatgtggattcttgtcgtcgggaccgtcccctgtggacatgagattggaacccctgtattctcgcgtcatacatgtgatgtggcttccaggagaagagtgaaaccctctgcgctgcgcgaaagacgggctttgtcgcaaggatgagtgatctccgggtataaagcgaccttcaattccgcccctatggctgattgggaattccaaaccccttcccttcttctgcctgtttcttccctctctgccaataccccaattctcagtcctagtctcattcgatgagccctgccagtcaccatacctgaaaaccctttcaaaccccctgctccgaacatgtcaagcgccgatttccgcgtggaatccttccggccttggaatcccccccaaggaaaagcacagtctctgcggaaccctctcaatatctatcgctatccaagtcctgtctccctcggtgccacgccgcctccctctactgtgatggacgccactttaaagagtcagcaaatgtatgctcccagaactgagcgacatccccttcctgttcgcccaccggtggaggtttgtttgaatggcggtccaccaccggactctcagatcaatcgacacgagccggaggccttagagcgaacatcatctattagtccttgtcctagaactttcgacttcgaggacatcctacatctgcaagatctatcaaactctggagatgatgatcattcaatgactttcggtcattctggccagaccttcgatcctcaaccctccgattttgaatcgggcgacctggagcttgctttcactgctggtcagcactctcaatttggggttactggaggccttagccagactggactgcttctaaaagaagcagcaattgatccggcaattctggacgaccatcatttcccagctatggagcagacccaagcaacagaacctttacctgacgtcgcaacctgcccaggcagatcatcagctgaaaactctcgcctttcggataaagatgcctctttccatggcaggcaacataaaccgaagaggatcgtgaaatctggtcggcagccttacaaaaccaacaatctttcagttgttatagaaagtcgcccaaagtctacaaccggtcgaccttctcaagggctcgggcgtaagaacgtttcgttttctatcgttcgtgctcaattctctgccctttcggtcgacgaccgattacagttcctgtcctggctgttcgagggtgccttagctcattgccttactacgccttcgagcacaaatgatgccgctgcatcacgatccatctcgaaccaggatgaaaacatgacacctaagtctaaacacttgggtaaaggggccgaaaaaatcgatgcggaacatactcgttcctcgagaaagggattacgatggtccgtggaagaggatcatctactagtgaaactcaaggaaaaagaaaatctcgcttggtcggaagtgttcaagcgttttggtcaaaagttccccggaagaagtgaagggtctatacaggtatactggagcacgacgctcaggaaacagcgactaccttgagcggaagactaatagcaaatgccatccatcgctttgctgatgaaggccaggaggcgtgcatctcgtacatgtttacctttaacgcaacctcaatgacccctaatattggtcagtggcgaccatctagtggttgcttgaatcagctgatgcttcgtcatgacgcatagcaaatggagagcgagctggagggtcatagttaataggcgcatgtgtttggcgtgcaaactgatgggacactgcacgtcctctcgggttccgcaacgtaactggtattttacggatgaatagatcttggctgaataaactggtcgaaactccacgtcaaagcaacattgcttggaggtggcggctaggcctgttccaagatctgagggagatctccccaaccaggattcagcttgctccttggagacagaactccacctcccaggtgggcatagttgcttttttcaatgatcacaaaaacgtgtttttcattgctcagttgcccatgtcggccgccagtgcgatactggaacacttttacgctgtatattgccagaattgtaagttatttctctttctaatgacaagacaccgaattcaggcagcgacggccctggtacttgatgactagaaatgtttgcatggaagtggttatgactcgccgggagtcgctccatcccatgttcatacgaaaaaggtcaaacgaatggccgtattcctgcgcaaaggtgcctcatcctcaattgttctttggattaacggggacttaaaagcagactgaacatcatctaagatacatatctcttcccttactgtctaacgccctcccatctaaaagcgcgttcggctcgaacaactcacggtctcggctcgacctgggaaatgcggactatcactggttctgctgcaccatatgttaattcatgccatgccacgtcggtacaggtcgaccaaccgagaggtatattttcgcatctttgctggatgcctctgacttgaaatatctcaccaagaatcattctatctggcttggatctttccaacagcttgacctgctttgcctcttgtcctaatgcattcaacgatgagacttcttgaaatatggtggcaatatgctgcaccctcatatctgtcaaggttagaaagtggcgtcaagaaaacgaaaggtctcctgtttcctactgtgagtcattggtcccatgcccaggtggtccaaatcgcctttcttgttctttctggatcgaacccaaattttcctccatttcagcaaaacttgcgacagtatgcttggttcaagtgcacgaaatgctgtcgcaaaataggcttgtacttgaacagtatctttgatgtcgatgggatgaggttgaatcaaagctgagcgctcatcctctatagacaaaatcgcttcaagatttgtgagcacaattttgagttcgtctaaccgaatgtcgccatcgaataagggcgatatttgaagccggcgaagtatatcattaacaaaacccatgtcaaataaccatggatcgaccgattgatggttactgagattggctattcccgaaaagctgtagtaaatgagtgctatgctggctctactcccaaagggcctcctagaaggggtttgccgcctctatagcatgaacccggaacaagacgattgaagtgaaacttcgccaagcttgaagagcatatatccgaggtaggctttcaaatcctccactgaaaacgcacgaaggcatcccgcttctgtgagaaggtttcgtgctttcatctaccaaccctccacttgcatatgattaaagctcccaggcataaagccagcctcctattgcttttctcccctagtgatgacgcgccgaagcttagcttcatcctcgagggttgaagatgcaatgaaaagatagtttagtattaaaatcatctgtataacactataccgaactttgattatgttttggagagcgaagggcgagcaaatggctgaagatgaaggattcatctttaggtagggaaataatgaaagttgattttgggtctttagatgtgattgaaagcatttggtggcgatgagagctttttgtatagcaaactaaccatagggccactgttggattgcttttatgataaagaacatacaaaaagttgagctctactctacgaagagcctatttctctaggctaggtgtgaaacctcagatgtactgtatgaatattcgcagtgttataactaatcaatccgatatatttgcattttattgctttttactccttcatattactcaccggtattgggatccataaaattagcaaagctagagagtggctagcagaaacttgtgtgcaaaaattaccgaattgtcagctatttcatcttgtgtattgctatacatttttggcgcttcttggacgctttttttcagccatgcaatggtatcctaacctcggtgttatctaaagatatttctgtcgatattgaatcatctcttggcttttaatgtctgtatcttctaggctctctatattcctaaatatgagctccaaggattataccacttgttttcataagtttacctgactggggaattttactcttagctggaaagcggtaactcgagagagcactatgaaaattgaatcagataaaacctttttggcctggagaactttgctgcaaactgtccgaaattccttctgttcggccaatgtgtaaatgcctataagccattaaatatcaaaagtcaactaacgtgagaatgaagtaaaacgagaatgagtcttgtggaggcttggtcatttgacttacatttggcaccatctttaaggatggctttttatcaaatatgtaattggactttcggaaaaccactgttccccggttctatgtcaataattctgcctttgacaagtctaatgttcggaggaatatgagggcgcttaatgatttctctatccgagttgtaatctgattgcatagaggtgtttgggaaattgttttctgagggataagaacatacaaaaagttgagctctactctacgaagagcctatttctctaggctaggtgtgaaacctcagatgtactgtatgaatattcgcagtgttataactaatcaatccgatatatttgcattttattgctttttactccttcatattactcaccggtattgggatccataaaattagcaaagctagagagtggctagcagaaacttgtgtgcaaaaattaccgaattgtcagctatttcatcttgtgtattgctatacatttttggcgcttcttggacgctttttttcagccatgcaatggtatcctaacctcggtgttatctaaagatatttctgtcgatattgaatcatctcttggcttttaatgtctgtatcttctaggctctctatattcctaaatatgagctccaaggattataccacttgttttcataagtttacctgactggggaattttactcttagctggaaagcggtaactcgagagagcactatgaaaattgaatcagataaaacctttttggcctggagaactttgctgcaaactgtccgaaattccttctgttcggccaatgtgtaaatgcctataagccattaaatatcaaaagtcaactaacgtgagaatgaagtaaaacgagaatgagtcttgtggaggcttggtcatttgacttacatttggcaccatctttaaggatggctttttatcaaatatgtaattggactttcggaaaaccactgttccccggttctatgtcaataattctgcctttgacaagtctaatgttcggaggaatatgagggcgcttaatgatttctctatccgagttgtaatctgattgcatagaggtgtttgggaaattgttttctgagggatgaagagtgagaagtcaatatcaagggctctgcgcgttaagagaaaactcactaggacgatttccagatccaccgatgtgtagagctctgctagtctctatttccttttggaggcatactggtagaagcctttcggggctagatgcagatttattatgttccagcctatataccgcgtgttcagttcgcttgtacggggtggcagtatttaggatcgttggctctaggccctggtctgtttcttgctcgtgttttggtctctaaagagactctatccaatttggaagaaacaatcggaaggagatagcagaaaggtaagacatgaggctaaattgatatacagctttgaaacctttcgataagtatggtaaaatcatcaataggaacggaaggctttaagcatgggctggtgttcttttaatatatccaggtggtcatataaagactcctttctactgtcggaggaagctatctatcatacattttaattaaataaaaaggatttagtcatggtgagtatccgtgcctttgacccgtggcgatgatatactcacatcataagcctgccccgattcctgtccaattcttgtatggaccggcaaaagtcgctctagaggcaatgatctttttgagaattgattccccggtactcttgaaatggacaccttccgaaaactccagccaagatgctagaatgctgctagacgcctgcaaggctttgaggaacagcaggtctcgggaaacgtatctggatgagaacatttctcttgaggaaggcttgcgcgccttcgaggggaatgttttgcacagtctcagttatagtactgttctaatgctagtactgatgacctggcatttcgatgcttcgtcttctgaagcgtcgtggggcttgattgctttcttgagacaaccttacgataatgaagtgaggagaatactccaaggtcgatactcaagcattatgcgtgagacggccccttcgaacttcgactttttgcttgtcctgaattgagtctatctggtgatcagagaaattgcatagcatgaatgggtttatatgtatttaatcaacggtatccaagctctttcagacggttaccaatgtcttggagatagccatcataccagtcccttaaggtcccttgcatcgcatatcccaaagcttctgcgagctgctgcctttttttatactcctgtaggcattttgaatgtagacgctggtaataaagagctttcttcgagttaaggtcttcgactggttgttgcaaaatgattggatcattgctgctcaagggaatgaattctggaatcctataattcccccaaacccgtgagatacccgtctccagcaccgcaaggtccactaaataggcaccgttcttgttgcgatggccgtcctgggcttggtgctgagctccgaggtcctgaagaccgatagcatcaaaaactacaccttcgaggccctttcttttgatgtcatccgtaagttggagcccattgtgaggaaaccagattcgcactgtcttggttggttagagctcggtattaacgcgaagaaaagtgaaccttacatgcaagcgaatcggtgccgagcctttggcagagagaccagagcaaggattggcgtcttccgcagattcaagcatacttttttgattgggttctgggcctccaaataaaagtgtctcgcgtgagctgcctggggaggagaagaggcgcggcatgcagcgcgaaagcttacagcgagctttatgtagactcaagcagaccatactaactgccatgaaatcccacagtcgaatgagcctgaaaatccccagtcactttgtagtacaaaaaccaaaaatacttgagctcttttcatcagtccttttacttttcttttatttttgtatcccgctagttacagagctaacatgttaaagtctcgctgcagcttattaccggattgtgcgcgccgcaacgcggtcatgcaacagcctacaagcaccaatccttgggtaagacaaggtgggtaaaagcgccatatcgatagtatctctagtgaccttggcatgatctctctagtgtcatacgccattcatgcatcatgggtcgaattcaaatatctggacttgcactcgccggcttcatacacactggccgctatcagtggctagagagcaaatcggccaaggaagaagggatagattgcatgtgggcttatccattgggcagatgctccccgccggggggggggggggggggggggggggggggggggggggnnnnnnnnnnnnnnnnnnnnnnnnnnnnnnnnnnnnnnnnnnnnnnnnnnnnnnnnnnnnnnnnnnnnnnnnnnnnnnnnnnnnnnnnnnnnnnnnnnnnnnnnnnnnnnnnnnnnnnnnnnnnnnnnnnnnnnnnnnnnnnnnnnnnnnnnnnnnnnnnnnnnnnnnnnnnnnnnnnnnnnnnnnnnnnnnnnnnnnnnnnnnnnnnnnnnnnnnnnnnnnnnnnnnnnnnnnnnnnnnnnnnnnnnnnnnnnnnnnnnnnnnnnnnnnnnnnnnnnnnnnnnnnnnnnnnnnnnnnnnnnnnnnnnnnnnnnnnnnnnnnnnnnnnnnnnnnnnnnnnnnnnnnnnnnnnnnnnnnnnnnnnnnnnnnnnnnnnnnnnnnnnnnnnnnnnnnnnnnnnnnnnnnnnnnnnnnnnnnnnnnnnnnnnnnnnnnnnnnnnnnnnnnnnnnnnnnnnnnnnnnnnnnnnnnnnnnnnnnnnnnnnnnnnnnnnnnnnnnnnnnnnnnnnnnnnnnnnnnnnnnnnnnnnnnnnnnnnnnnnnnnnnnnnnnnnnnnnnnnnnnnnnnnnnnnnnnnnnnnnnnnnnnnnnnnnnnnnnnnnnnnnnnnnnnnnnnnnnnnnnnnnnnnnnnnnnnnnnnnnnccgccaggggcccaatcatccttgttggtggctctggtattaatttctttctcagctctctcctcaaagttgaaccatctcttctaaattatactgtcttaatccatgaaccaacccccttatccatgagatggaatccagcaacgatttccactacgtcgccgatttgaagaggcacatttgtcaccttgaggagatactgagagagtggaaacgttatgtcccacaggatgtcatcttgcgatctcaaataccactcgaaaccacaccatctcatcttcttcaacctcaaatctctcaaactctttcagcgacccagtgtagaaggcatccgttgtcaggtacatctgggtcagaagaaacatggaaaaagcctttacgaactttcatcaacagaattccttctgtagaaaaatggcctggcacagtattacccccttaagtttccgttttgaacttgttattttaaagcgaaactctcttaagagacagtgattcgccgacatcgactatctaatatcgacattcagatatcatccaaaccatcggggcttttgcttccctcgcacaaaaatgtgccaacgatgtgaagtgggcgaaatacattgtatcatatcagaaattactgttaggtgcgctttgtcatattgcatgttgcctcggcgtggacccaaaatcggtggacaaaacgatgaacttgatttcgaaaggaggtcccgaccatctccaagaacttcggcatggagcagcttggggggtcaaggcaattgaccgccttcagacagagagcaattgggatattagaagtggtgacatcttattttactgtcagggttctttgtcgataattttcatatggagctgaccagtgagtctagttaccccgacctttacttctttgaggtactgggcgaaagcaagtcaatcgatttcaatatttaccacctgtttgaaagaagatcaatatacaacacaccaagagagtttgcacacaaaccatctctctgttccgtgcataatcaagtgcatattcggcagaagtgtccagtacgtatatttaacgtttctcgtggcgctatctgctaacaatcagcccctagactctcggacgtgtgcaatgctttacactgcaattttgatcttgctcgaaaatcatttgcaaattggtacttagggtcatttgggtcagatgccatggatgagttggaaaagcagaggatcttctttcccaaggcatacttctccttgaacagggagacggaatttggtgaaagccagactgaaagggactcgcaacccgcgagagactccttgcgcgagtcgcagaaaagacgtcgtattggcagcgggccaaattcaaatcttgacagcttgtctctcactccaactttgtcagccaatgtgcaagtgcaggcagcatttcacgaagaccccaatcgttcccttccaagtccaccaggtgagccatctagaaacgagatcccataacgtgatgctgactcccacagaccactatagatatacctcgagcagaaatgcaagctctctgggggtctcacagcaagaaacacgagatcaacggcttctacttgctaatctggatcaacaatgtgcaatcgacgggcgtcagacggcatattcgcttccccaaatcgcggaagatgaatcacgtaagttcttcattgagtggccaataaaataacgactgaaataacatacagatccatgccatctgaatttgacgggtcctccggattttgcagatgtagaagccctctcatattcccttccctccttcaatgccatatcggagattccatttttaccgctttccgagttttcagctccccaagaaacggtggtgtttccctctccttcacttgactactccataccatccttctcccagatgacaggtatcccctcccctaaataaccacgccatctaatcgaaatgactgtcaaatagtctctttgctccatgtcaccacgcagacacaagagttcaaaatctctatcaatccactccattctattgagtcatcgtttgctagcgggatatttgcatcatgattgacaagagaaacgatcgcattgtcttcgtgtaggaggattgctgttatagtaccatagggttcccgtggagatgctccgttcgtaaagtgtatcaaactggttttcatattctggcccaaggtcagctgcatgcgacatgaatgaaattaatagcgcgaaatccgcacctgcttttgaaagggctgaagaagatctgccggaacgtttcgacataatctcatatgaggcgcatcgtccttcgctgaaaattcggccttcggtagccagttcctcagtttgtcgcaaggatcctgctcctgttttttcgcagccgatcggaggtaagccatgggtccattcactgaatcgtcacttgcgccgctattgagtgcacatatggtgtattgcttgactgggttattttggtcgagataatcggcacgacccttgcgccgtgaggcggggttgggcataacggaatggagcacgtgaaaaattatttagccccaccatggagctcttccagttcgacagttgggaatccaattataatttacaaaatttgctctatggataatcttccctcattcccacgcatgctttcaacaaggcaattgacggggactttcctttgcatattcaagaatctgccataaacacccgtaaatcctgctatactcagcactactaggaaattgacgaaggctgataccgattggcttttgctaggtcgaatatcatctataattaacgtaatttttgccaaggatccgcagtaactattgaaaaggtcgtagagcagtataggctaggaccgaattaacgtggatgtgatttgctttgcgtgtgattcgtgtgatatgccctgccgtatgcagatgacgtgggctgtattgcccttctgattttgacagccgtcgtgtgatataagcgtgtagacgctcggtgatagactgatcagaatatctcggtcgttattcgcgtcagccaattcttgctcagtgagcgcaatttatgcgactacctcggcacatttcctgtttacaatgattgtaatagtttatgcgtgggggctcccgagccctcacgggagggtccgcaattggtccgactccgtaactattaacacctgttaacaattacccctccttttcgttactccagcgttcatctcatgtttttagcaagggccatcagttcgatttttatcttattttaggccgattcacgttcgttcgtgacctcacagaaaatgaaatataatggcgcagatggccttgaattcgaggcaggcaataccaaaatcgacccagctgtattgcacggtaagctacaagccccagcgacctcacaagatctttttcacattgactgccctaccagaactgcccgaaggatgcagggtgtcatccaccgagaaccatggcgtaagcttctgggcgcagacgggtcgtatcgatgtcttgctccgcaatggtacaccgcaatccttcttcatcaaggtcatttcgaaaggactaggcatggatatgaccaggggcgaatttcagtcaatgagcgcgatccataaatttcttccagaatttgtcccaaggcccatcgcttgcggcacctacagcacgataccagacacccacttcttcctctgcgagtttcgagaaatgactgacgatatgccggatccccacaaatttgccgcccttctttcaaagctgcatcagcaaagcgtatcgcctactggcaagttcgggttccatataaccacctacgcaggaaacctaccccagttcgtagcatgggaagagagctgggaggtttttttcgccaagaccatgagacaggcgcttgacctggagattgaaaggaaagggcctagtgaggagctcgatgtcctctccagtgctttgttcgaaatggttatcccaaggctccttaggcccctcgagagtgacggccgaacagtgaagccttcacttgttcatggagacctctggtacgcgaatgcagggattgatgtcgaccaagatcagcctctcgtcttcgatgcatgcagcttctttgcgcacaacgaatgtacgttctcctacgaaaaactcgcggttgctcgcactaaaatttttaattttggagatgaatttggtcagtggcgaccagcttgcaataggtttggagacgagtacgttgctgcctacaatacattcgcccaaatttcgccaccggaagaggatttccaaggccgtttagacctctataggctgtgagacacccagaagctctttccctccttcctggtttgtgtagctgatatcaagctaggaggtttgacacacatgtttcagcgctttttgtcgataacgagacacttcgcacacagtgagtctattccatgcctgcagtctagttttgcggctaatgaacttaacagggtccttgatgtgatgagagatttggtacagagatatggttagtggacaggagcaatattagtatgtactttttctaccgtgtagttctaggaaagtgcgtgctcggaggaagtctcggccacaagcataaaaagccgcaaaagaataactgaaatcgatgagattgaactatctagagctaataaagctgatcaagaagctagagtgaatgtgggaacggggatctcgtcccgtcccacaggattatggctgggcagtttccctatcacattcccgtaagtggtgatctgtatggcatctacgttttggtttgggggttagatatatcccttcacattagtctcttactttatagatactcttttagtcaagtccgccccttatcaccgccaggtcgccaccccgagttaacataatatctctctttgccaaggcacaaacaatgtccttccttccagcaaaccaatcgtatgggacgaaaaagtgctcaaagacctcgatggttgggggatctttgcgttgcgcgatctctagctcgctgatcccaacagagcagatccaaaacgaccggctcaagaatatgagtttcttcgattcgtcaattccgatgacatgtgcaacgcttagttcgaatgcagtcatccatgaacgatgcggagcgaccggactcgatgtcgtgagcaagttttcatcgtcttcatctgtggcgcattgatctaactgcttccctagcaaaaagctgctgtcgttgttttcgatggaaaggcagtctgcgtcaattatcgcaatcatgttgatgctcgcggagctattcggatataacaagtcaagtatgattctttgtttttggccaagtgaatagaagctcgcgcttttgatctctgccgtgtcgttgtccaacgacagtgcaatagatgaaacttcagaccagtcgctccagcagtaagcgctgattttgacattgtcgacacagaccatatgtagggaagattctggatgagagagccatttgcgaattcctggcactagcggatatgtccgctctctctcaaacttaccgctgtccaagttgaacagataatcagaccctcgagtggataccaggaacttcgccgctagttctcctactagcacatctatgattgccttctcggagtcgaggtgggacttgaacagtaccgtcgaatcgctgagccaacctttatctgctgacttacgaattctgtgtgcgaagatcctgttggaggcatcgatgctaaggagggcatctctccgttcaatccagaccaacaggcggactggtgatttatggctgtagagaatccccaagctcgctaccattttccgttcgtacagtacgactgatccatcatcctttccgcaaaagatgacttcgggcgtgtgatgaaccgccatggcagtgatcttcgctttggcttccatggaaaccgtctctaccactgtagtgaaagtggccccactgctgtcatcacttatggaccctcgcaacaaagcttcaggttcccagacagtgcactgggcgcctcgtatgtcggcaagaaacatactgtctctggtaaaggcaagctctttgatataagagttggatgacttgacctagtagagaagcttaaatgtatcaaattcgtaaacgtggataattccatttgcaccacccgctgcgaggagacgcccatccggacttggggcgagggtttggcagttggcacgaaaacattccagctgcttatctgcaaagggatcaagaagggctagatcaccatccaggtatgcgaccgcgagaaggctgatatcaggattggggttgaaagcaagtgcgacgacgacatgcgtgctggtatctccgttggaaagtttcttgccacagctaccagcgtaggcgtcctcttccatgtcccacagcacaattagccggccgctgtaagcgacagcaagcattccttggttggtagaaagagtcagtgcgcatagggccccgcgcggaggcgttcggttcggcgtatcagtttcgtaccatggcctccgcaccgactccggccgggagctacgtcctaaatcccaagttgcgacgtagttgttgctactcgcaatcaaaagcatatctgcatcgaattccatccccatcggacgtagagggctcgcgaggctgtgaaccacttgcccacttctgaagtcccagaccttgaccaacttcataccacaagttgccaagaggtcagtcttggccttaaaagcaacgaacttaattgcttctccgtgctccaaaaccttgtactcttggtaggttatggcgtagtatagtacgacatctcccgagctgagaccaagggcaaggaaatcgtccccatagcacaaggcccttggttggccttgacggaagtcgatacacagcagcctgtcatcccattgcttattaggcgcgccaagcactgcgagcctccggcctaggctcctagtgttgtaaaccatagaatcgatcggacagaatggaggtatcaacgagtatattgctaatagtgatactgcaagggcgttggcgaacatggcaggaatccgagcgagatccgtggtccactgtcgtagcgcttttatccgagggtccagtggtaagcgctcaacggcgcacgcattgacgtacattttgagatgctttaaggcgcggatgaggtgattgagatttcgagactcggcaatcgcctcgatccaagtgaggacgttggaacccaagaactacatgacaagctggaacgtcactgcgaccaatggatcagccctcgagaggtgatatgagtatgctgtatatgcataggcggcaaattctactcttgctgctggcaaatttgccgaaagtcggcgtcggctgttcctccgaggcttcatttcctccccaattaggtaattgagacatacctgagccatacgtgtgtgcgctttagtcctatcgatggagaactcggactcaagtccgccgtctacaagaaattctctggcagtttcatgcaccatcttaaccctcccatatttgtccacgaccaccagttaaccgcagagcgctacgatgctctcctccaatcttaggaatgaatcgtggatatccagagacagagcaccgcccagttcgctgattgtcattggtcgaatcgcgcatgctgcccaaatgagaatggttttggccagctcctttccgcgaacggcctgtgacatatagtctaaagtgcgcttatatagagactccatgcctctcgggacattttcaagaatccgatagatttcctttctgctgtggcagcgcaggagttcctcaagcaccaatactgtccataagaaagaacccttagatttgtcaaggatcttctcggctaaagtatctcgttcgtcaggtccaacgattcctaagtcctaggtcctcctctcaaccaaaagcctgaggtcaaactctgtgtcttttatcgagattggtaaggactggactaggttagatagaatgacagagaaaccttgatccagatcgactgtattccggcttgtgacgaggattctcaagggcatagatttgtccatgttggaaagaatggcatgtaaaagaatatgaggattagagcattcgtccaaggcatcgatgacccagtaataacgagtcgttgtggtctagaatatgccagaaaggaacaaaattctccaaagagtacgttcctcgacgcgatctaagcaaacaccatccgcttgcatccctaggatggcatcacttgcttcggcatcggagctacccatctgaaaagccagggaccggagacaacgacctaggttagacttcgacttatctccatgcttgaagaaaaagtagctgcatgcctggccggactctttgagctagtcgatgacatagccagcgagaacagatttcccggttgcgggcttgcccttgatccatagcgtcctgtcatttccggattccccctctctccatttgacgtaactggctttcgtcgatatccatctgcacgacccgtgcagccgagcttcgcaaacgtttgcaaaatcatcgtctagcatattgaaaatttcaagatagttcttgagacttttgatcctctcgcgtctctgcttcagcttcagctctgcgatcgccgtggcaatcttgctaacagtagaggcgagcgcatttcgtagtagggcataattggagtcttcaggcgtgtcaaacttgcatatcgagcggtggtcagcagccataggtatctgcttctcttcacggtacccgagaacggccgattcgggatcgacgatgagtgagctgaacagtttcatattctgcgtttcgtagaatgaccagagctcaaggccggccgaaaaatgccgaaattcgtcattgatcacttggatcgccccagagttcggttccagatcgccaacataagcgcggtcgtacgcaatcttaaggaggtaccttagcgtctttgccgagtcggcacctcgatgcggcgtggcaaggaaatataatgcggtaaatcgttcagacagtgccttgtgcactttgtcttgtttcgccaggatatatgcttttttcatcaccaagccacccatgctgtggccgatgacaatgatgtatgtcgcagaattcataatgcatggcgaagtgctgatcgcgcttaggaatgtcttgccaatgtggtgtacattcaagcagtcctccctacccttcaaatagtatgagtcgtatccatagctatggatgcgggcgttctggaatgcaggatctttggagagccactcctttggccaaaaatgagattgcagggatgacttgctccatgtctttctagaacttccccctaggccatggacgaagatgacatcaatctccggtaccgtgggagaatacaagaggtttagtccaagcgggcccttcacgtcctccgcctgatcaaccaagatggctgacgtccgggacaggggctttgacagagaaaacaagctcctcgagctcttaattgaatcgcgactactcgaggaattatcggaatgtggatcgggctttgcgcggtgctgctttcgaaagaactggtacagtcagcgatcaagcagaattgaattttccagtaggctaaggagtcgagagtttaccattgtagcccacaaatttcagtgtgtggggcgccaatctcggttgcccgaaatcatctaaaatgacttcagcacgacagtctgtcaatcagaagaacaatggaacaatggaacaatggtacaatgaagtcgtttcaggaaagactgttgatgtccagtgcctcgggatcgaagcaggtagcaattaggcggccaattctccctcccgcttcaaatccttcaaaccaccaatcagctggttgctttaagcgctcctctatgaaccccgcaggctcggtaaaggccagcatgcatctcttctagaaaatcgcgcactccggaattctgtaaaacccccattgacatgcacctttcttgccattccttgatgatgctgtgttgatttggcccataagagagattctccgcgcattgtgttttagtcgaaagagcgatttagcatgggttcccaggcgaatccggccttcacagttggggaccatgaggctttcatggaattcgctctccttcaggctcaaaaatcaccgccggctgccaacaaattctgcgtcggagccatacttgtcgatgccgctaatggcaaggtcctatcgacggggttctcgcttgaatacccacgagactacaagggagacccaggcaccacgcacgcagagcagtgttgttttatcaagattgccgatgagcacaacctcccagaggaacgcatccatgaagtccttccggccaatacggcgttgtacacaacgatggagccatgcaacgagagactgagtggcaacatgacctgcgcgaccaggatcttgagactcaagagcgccataaagaatgtctacgtgggaatcaaagagccaggaacttttatcgcgcacaatgacggacaggagaggctggaggcaaacggcgttagggtcatgttccctgttgaacattggcgtgacaggatcaccagtgtctcaatgatggggcactgaagactgtgatcaggttagctgagataaaagagttgaggttgcggaaacacccggacggcccgtccgcccacacagctctagtttaatctggccctcttattgttacctagggacgaaattggcgtgaatatacatatttgttgctgcgaggctctgggctctttcttccctgcgattacccctccctgtgtagctcattcctcggacataaacgcccccgagtgtgctcatacatgaaaatacagcatgaaaatatgaccgaattagcgttataccctgatctaattgttgtttaagaccaaagtgtattattttcattgtcaagctggaagcgattgggaaagaattcggaagatcccagatatccttgctctaaattaagtgcgttggcgaattgctgcgtgcataggccaaaagacaaaattatcagcgctgttattcttatctaagattcttcaacatgactaactatcctagaagtgatctgtgctcggtaatcgtgtgagctggggcgataagaggcatcccactctgaactgacaaataagtttacctaatccaaagtgataaatatgtgtcaacaaaagaaggttaccacaattttactagtgcgcccgaggaatattcagcacccccctctgcctgatgatcctaaggctcccaacgaccttactaagctcatcccctagttatttattctgcactttctatagtatataaaaatcacactctcaagtactcaattggctatgcccgtactagtccgtactgtaacgaccacgttccggcagtatgcaacctcaagtatcctgcctcgcttgcgccgcgtagcatccccggggtctaccatggattcctcataccgttgctaaattgcaagaatcttctgaactatgtacatggttgatgatggcgcccatccttcttccgcgtgcagctatacaagagatatacatgacccagaaacacccaaaggcttcatctgaatggaaggggctcaacgagagtgatcaaaccaaagaaattcactgctgcactgaattaccaacaatgtccaaataatgtgcacatatattcacagcttgatggaatgaacataagcagcaacctcactgccgaaaatccggtctctcacaagctggtcggccgactcgacgatccaagtctggcagttcctctgagtgagcctgctccaccccctagtggaaccgctccccctcagagaacctgccccgcatcgtggaagtcatgacggtacaccgaattgaggctgctatgctggtactggtacagtaggtcccaaaaacttgtacgaccattaccctcttcgattggttccccaatcctaatgccaagcctcattgatctatatcccgaatagggacggaaaattgatattccggtatctgcgtcatcacctgctctacacaagtcggatagcacattcaactctcctgcctgcctcgcagtggtcgggagcaaacagccgggacattctcatttgtcagatacttttaccgtggtcactcgactttacaacttctttgctatcgctttgaattctggactttattgacggcgaccaccgttaaatgcatcccgcaaatgatatcacaacgacggtcgatgacggctctcattcacgggagagcattcctccatggggctcattgcccattgaacaatatctgattgtaggatacacgagacacagcctgtttattcgcgacttgtcattcgctaacaactcaacagagaaactggaatcattctgcgaccgacacacccaaccagcagcggcggcaactaattcaccagttcctcaatttcgatgagattcccgaagaatatgtttctttgaatgggttccccccgctaaagccaacgtcggaggagattgatattattcttcaaccctggcgatccgatagcgaccttcgtcggaaagcatactatatgtccaaagataacgtgcttgtttttcttcggacccactataacccagacgacaatgacagaatgaacgaatggggctgtggaaacgatctgttcgaggataacgcctggtgggcgtgtctcaatgatccgtatttattcaatttcggctcagattggcagcaggtgtacgaaatcatgcctgagttcgctggtcccgttgatcgcaggagacaatctgctgatccaaccaatttagaaggctcttcagcaacgtccgaaagaagtctgcacacaaagaagccgggaggtttccatgagtggacagagcatcaggtaaagaagactgaggagtcagccaatcctctacagaacgtcaccatagcggcatacattgttattgcggatcaggagtcttttcagactggactgttgcagttattttgtttggacgataatcgaaaaattgtctgggaggctcgggttgatcgaaagccagctgagatcatgagacgtattcgccactcgggtcctgcactagaactataattttctgaatacaaaaaaaacaggattgtgaagcacatggccacaagtagatatggtgcagtagagacctaatagataaataatcttgaggtctcgccatatcaagagagatagactaccaacgcaatctgtcagtacacatccataggtagcaatcatcactatgccagcgtcgcgtaacaatgatcgtgtaagctaaaatcaggtacattctgtgctcttgacagcttgtcatgcggcttctttagcctcggctgcaatgggaggatgaccagggcctttgaatagcacaccgatgatggaaatgtcatcagaaaccctatcgctgatctcatgaattttgcttgggtcaagagatgatatctgggaaagggtataggtctgcatggcgtgagtatatgcacttatggcactctgggccagagggttgccagggctagggtcgaaaatcgattcgggcatgacgggctagaacgattgtttcgttgcgtaatttcgttcactggggcacgtcttaagttgtcgtaacacaatcttgcttgggaatcagcccgatcaactgaccagcgatctagcgtgtataggcaagagaaaaaggcgtacaaaaatatgctgcggcgaaatcgttgtagaaggaagtagaacgcaactgccattgatgaaaatataaattgttggatgacaattcaccgaaggaagaggatgtcgtgctaacaggaaaagcagaggaaccagatggggtgcgaacccagattcacggtgaatcagacacccattacgcacgcaagtggctttgcttgcggacccgagggaaccaattgggaggatgtcgacggacagggagaacgggaagtggggtagtaatgtctttagtcgcgatgcggccggagaaagtagccgtccactggactcggtggattgcaccgcagctcatgtcagggcaaaggataaatttggatcatgcttcttggtttattccccccaatagttaacatcctgtgcatactcttcattggcttaccgaccggtctgcgaccacgcgtcagggatgcaacaaagatccccagccactattttcggtattttcaaataggatccacaaaagtgcacaatcacaattctacgtcttatcccacatgagatgctttgtttatgggccaagatttgcgagtctcttggagaaagtaccccactgaatgttcgacttctatgctcgggttgtgttactggatgatttgttccaacagctgcctctttgctgctattgcagtgctttaggggagacgtttctcattatgctgtctgtacagatagcgtcccgaggtacaagggtttcgttatactgagtttacatcaaaaagcgcaaggttttctattttgatttataatactcctgatctgatccagccttaccatctaactgcatttcgtatgggtggctctgatcgcatggaggagggttctctatggcccttgtgcacattgacggctggtgggtcgactgggattgtgcttgtggcttagacttgttcatgttgctgctatggtttgagagaggcccgtgtagaaggtacgatggctgggcatgagggctgttcatttggctaccatcattatagcccattcgccgcttgcttttaggatagtactgttgctgggaagcatgtcggagcctttgggaagcagattggagattttccctctgcttctgcttctgctcctcgtgttcagtggcggccctaatggaggatatatgagtatgagagtgacaagcatgggtggaagacttaaagaacggacttggatgtagctttaatgaggctatagccaccacctaaagcaaggccagtcttgatgacacccacattttcaaaggggaaggagtttcggtagaagcttaggggattattgaaaatgtggaaatttgaagaccggaaaccgagggctattcattattgtctagcactagaagctgtgtcgttcgagaaccagagttaggcccctacacggttcggatttattggcaggctttctgggaagatgagaggggtaggtaaatggggcgcggggtgcgaagcagtggtctagcgtgcattccaggtgccattgtgactaaacatgcgttcccctgatgaaacgccaacagatggaataacaggaaatcaggagaagcgaggactatcatatattcatagtaaaatgtcataacttaactgtaccgtgctcaagagcgggatggaatctgtccaagtgggtgccctccctggaagcggtgagggtgcagcaaaggttcgaagatcacggataccgtctgtcttcctcgtttgccggtccgacgttcttgaaaccccagagaccttacgagtctaatacagaagctattttgaagctgtcatttacgcttgtactggaatactgccaagaaaggggttcaggggtagaataaccgtaacgggtatagcgtatttcgccacaactgcctctttgtggctgctgcaatgcattaggggagctatttctcaatatgctgtctgttcagtgtccggggtataagggtttcattgtatatactgcattttacaccaaaaggcgcttggttctattacgggggccacttaggtatattttgacatcataggctaagctgaaatgtagcgcttgccattatttatctaagacactatcacgatattaccaactgcatcacacctgtctacgtccaatcaataccagggccgcatcaagtgcaaggcaaggctcaacgacgtgcggatgtaaaaatatccaataggaaagaaatacatccattaataaattaacaggaacagtgagagcttcaaagttggcgaggacgttcagaaccgcttgaccggactaagaggaattccgatgccatgcttgccacggcatttgtgctccaaggcttccagcaagcggtatatttcttgttccagctgacggccttggcctcgcggatccatagttgcacttctttcttagttagctgctcggtgaattcaccgccggtcaacagcctgtccactgattgttcgaatttgctgcaacaagcgagaatattctggcagttccaaagaacatacaaaataaaagcgtccaaaggaaaagttttgttttgtctgcagaataattagcggaagatgagcagtcagggaacttggagaagctccacattttctttcccgtttcctcactacacaaaagaaaaaaaccacgtcccagatggcaaccggaccaccaccagcgctcaccaactagcttgtgctcgtgaaaagacttccgagtcctctccgctattgctttagaaagggacgctgtgccacagatgatgtctgtggctttgaccttcgcagtctggccagggtgaccggcttctttttgtctgtgaagctcttcgacatacgccaaataaagcataatatccgcgagccgagatttgagataatgtgtctcttcgcccgcttgcatagcatctacgtatctccaaatcgcaaagcctttcgtgctggaggatacgaggggatacttcgccacgtcaagctgtggagaatgccaaaatccggtcaacttccatgatttggtgtgcttttccataaaataaggcatgtcaggtcgcaagatacgatcgcactttctttcaacttcgtccttcttttctggcgatagagtggataggagaggatcgcataagaagcggccattccatttatctttacctggcttggaaggtaccgttgtcttagtagggccaacacttgaatccacacgacctttgaccactgaacgtgctaagattctccccgacgaggaattttcgccgacattctctgcaatttcgtcgtaatgcggggcttgaatcccactctttcccttttcgagacgaggtctgaggtttctggagttgggagctgaatgtgattcaagtccgggaaaaagcttccgtttggtttgcaaaatttggcggttttcacattccgaagtcacttgacgactatcagtgtgttgctcctcattgggcagattatgccggtcacttctattgaaggtaggggagatagacaccggagtgaaggttattggatttgactcggtattcacggaattgttgtcaccaggtggagaattttcgatactgcaagaggtgtcctgcaaaaatctgggcatctcgtccaagacggactcaatttccgagtctccaaagtcttcgtcattggtggatgcagtctgggggtgatcattttcggtatcatcagaggcatcttcgaccgttggctgcaatttcgagaaggtgggtgtactctgatgtttgtcgacagctcgattctctgagtcaatgccgcttgttgtccttcctgccgatctctccacatatttactccttgaaactggcgtatctggagggtttgaagtgggcgtgggaaaagacagacctgcgcctgacctcagagatggtgaagatgttcccagggctgggcgattttcacccgaatggttgcctgtaacattttgttgtgcttcttcaacagccgatatctccatctcattaaaacccccttcttgcatgatgccagctgaaacattatgcggtgaagtttctggtgacctctcacctatccatacaaggcggccgctgacaggagttggagacgttgggaggctagccacgggactatcttcatcgatatccatgcccggggtccattggtcttcggaccctcccgtcaaacgtgatatgaatgatgcgctttctttcgtaggatcgcaggacctaggagtggagctgggtgaaggttcgggtgcgtttgaattgtcacattctcggagtgcccagtcaaattcattagagggacaaccatcgtgtggggtaacgggagacggtttggcatgtgggttgtgggctatttctgttttcgaagttagcctttgttcaaatgtctaaagcccaatctctgtagaattttggatattaccgtgtgggggtgaggctggttgactcaacatagcttccgcgttcgaaagtgtcggggttccaaaacggctaggatcaggcgttgaaacaaaggctgtcatgttgtggtctcgtacgttcatgtccatcgtagttaacgaagggtctagaaagagagcacagtaaacaacggcaattctcgtgcgtcagaaacatgaaagccttaccgatgcagactggctcaggcgatcgagcatgcgcgacattaccaaaggccgaagtacatgttgcaggcgactgcacttggcaataatccacgatatcatagtcgatgagacaatctgtgctcattcgggctcgctcgtagaggacggcgatctcatcgcgagaaagcgaagattggattttgcaacagtggcagagggagcgtaaaatctgcattgagattagatatcttgcgaccggtgggatatggaaatgacaaacctcatctgctgacagggacggtaggttatttagactgttctgttctgcatcaccagtattctgtaggcaacgtcagatatttagaaaacaacgtaaggaagaaacccacattcaaagtaaacctgatttggagcatttccgacgcaagtgccctctggtggggaaataaaggaaagttgtagtgatatggctgggccactggaagggtgcgtaggaaagggtatcgtagagagttggtcgggcgaagaagacctgatggagggaaatcgccctgctcactctctgctcaccctctgctcaccctctactcaccctccctgatcatgaggggtgttgaatttcgcaaacttcggcatctcgatgaacataacctgaaaagagggttggaatacgcgacaaacactgtgtcactcttaaaccgaatttaaaccgcaaattgtttggtcgtgttaggggcaacaagtgaggtagagagtggaaattcaacaacgtggttaacatggtaggcattatcagctggtctgatttagtcaatgctcagtgaatatcatgtgaacggaggatggaccaatgaagggccctaaaaaggcttacgtagactgagcactccgggcgtgggtggaaaatcctttttcctttgtactcacaatagggggcggaggatatggaaggctctggtaccacgtgaccgtgtcgaattttcgatacgatcacgtgaagtttctcccgttataggccggcacaatcctgagggggatgttgaccttgccgaattatttcatgctgttgtttgattgtttccatcaaaatggtggaacaggacagcagagccctatattcgcattcgattttctaatctctcctatagaagttgtaggtatctccctacaacgataacaagaatgtagatgtattaaatcattttacatccgcccgcaattcttcctcttccaccctttcccagccaggaataatgtcttctaaggtctctctgattggccgtggataataatggtgctgtaattcaataagccaagtaacttccagcgcgacaaaatcactcatacatacctcgtccttttctgccgggagccacttcttcttacttgactcgaagatgtatagttggccactttgccgatttcggacggctacaacaacgtctgactcacagtagatactgtactcggctgcctttttgaaaaggccttttctgcgcctgcgtaacttctgtgctctcgcacgaaggttctcatgtttggcggtgattttagaaattagttcggaacttggagccattggcatatatgagaatatttcggattcttttcagcagcttatccgcattcgtggttaatatatctttgctcacggtctcagtgagggtccgccggatcctacaaggaagcagcatttgctgtgctgcgcggcccatccacagcgaccaagtatcgagcccttcaatggtgtattttgagtatacttattctcagcgagccattttaaggtcggttcgtaactgatacgtccgccataagaaggatataacagctcgggtttcgcttttattttgattcgcaacatggatatcttgactatctatgcgatcgccgttggcggcatcttcacaagtcttattatcattagagtcttgaatgtctttgcgccctggggcaacgcgatgaatgttttcatttaccagcatcttgcatatccgtatgttcttcgccgccattcacgtctggggccttggacacgagccggtgtttctcttcatttgatctacctcgcagtcaatttgctgctcctgtttttcaaccatatatccatggcagccactggtcgtcgagcaggaacgctgtcgctgctcaatatgatattccttctggcttcatggcatctgagcaacttggctgatattttcgggatttctctgagaatttaccgacggatgcatcgtgctgcaggttggatggtggtagctttggtattgtttcacgtttttgccatgctacagggcaaaattcaagaggatcaggggatgaacactgggcgcctttctgcaataattgtttgtaaaatgaatcagtcattacctggatctgatctaacaacatattgatatttagggcgctgggtctctatgctcgcttgtcattttatccctgcctttctgtcgaaagttttcatacgagttgtttcttcgactccatcaggcactcgttgttgcaagtgtttatgggatttggcggcatcttcccggtgaaacgtattccccccggttctatctctatgttgcattgggaatattgggctgtacgtccctctcccacttgatactccttctttataggaatggtctcttttctggcaacggatgcccgagagctattgcgatctgccatacgaatgaacgcgacgcagaaaatgcaggccaacacgtgaggacaacgccaattcgagtccgcctcattctgccaaggccagtcaaagcaatggccgggcaatacatcaacctgtggctgccttcgctgagtttatggtcctgggcacagacgcacccatttatgatcacgtcatggtctcgggcagaccagggtgtgttggatctcttggtagagccccgtggagggctcaccaaagctcttgtccgccaggcgcacgcagcagcaaaggacaacttctcttctttggccctttatagcggcccccacgggatcagcgagtctgtggataaatacgagagcgtcctgttggtagcaagtggggcaggtattgccgctatcattccttatgcaaagaaattgatccacggttataacacgtgcacatcgcatgtccgcagggtgcacttgatatggcaggtagaatcgcttggttggtttttttgctcttgatgaacaaaaggggataggctgactagatagatgttgctatatccatgcaaggcctcctgaacggtttgttaaaagacgatgtgctagatgatggctacgttcgtttgaaggtgttgtttcatgaccattagctgacgaagccttagatacttgccatatctgtctacgttgggcgagggcctctcacacatggaaaactgccctttggcaagcacgaacgagcttttctataccagggcgctccggactattcaatcatcattcctacggaggtttccggtgaaaaaatcgaaagactccccaatatccgagacgagagaggccaaatgctattgatcggtaggattctacgagcacgatagattgccaaacgctgacatggtaatgtttatagcttccacctcgggacatttgcgagatactctgcgacatattgtccaaggatatttacaccaacgcctgcaaatgatagaactcgagtatcagctataactctgaggctctggttgataatattgcggggcaggtgggcctatcatctgagggctcagggtgttgtgtagttccttgcgtgcgttggaattagaacgtcaatagcagatgtggttttgcgagattaggcttaggtgatggggatctacaatagacatgcaatttggacgaatcagggtgtggaggctgcgacactatttggggaagcggcactgtttaggtgccgcacccgcactctgtagtttaggccacgatttgtcgctgagaccacgatttttggcccaggccacgattcggtgtcgcggccacattttggtgctcagttctgctcagtccgatgatgtcatttctttgggcaattcatcttgcccttctatatctcagcgtttctgaacgattctgctcagggaacgtgactgatcattttccacactatttcagccttcttgattcccgttctccgctcgttgtctcgcccattcttggaatcccaaagctctctccctaagtgcttctgcaccgtccattctttattcttattgacgacattatttatttggccctggtttttttccttcatacgaacccgactttcatttttattgttaccgaatactgcctacgctagaccagaggtacgaatttctgagattgtatgctgaaattcaccagacctgaactctcaagtatttagaagtgcaagtcaaggtaaacaagccttttcttctttttcaagaacacctatcacattgccagtgtgagctaataatgaaattgcaagatggccgaatctaccggtctcatggacgatacgattgactggatcaatcataaaacccacacgccaaatcctgtatcagatcagctttccggaccacaatgcgatcatcttgatttcacatccaacctgaacattccgcccattccgcaaggctttgacagctaccccactactgggaatgtcatcaactatgctttcattaccaacagcaagatcagaaacacggtcatgaataaagttgtctgcattagcgttacgatgagagatcctcgaattacaaatactatgatcctcaattgtgtggatacaaaccgcattcccactttcacaacgcttgataacgctgatattgacgccgcttttgtatttaactctatcatcgtcacctctaatatcgacaattgcgacgttgctgaatcaacccttggcaatgctaggctcattaatcccgtcttctgcccgtttctgtttccagagctaccgctttcagtccaggacaattcgaccaacgccggggtccagattgattataatataacacctgatacgacttttaacacacccggcattacatctcaaaaccaagaaataccgaatacttcagctcaaggcatgcaaggggctctccgaaatgacacagacgtggctcctcaattatcattgaacctgctccaagaggctcgggcttccttccagaattccataccggagattggcagccacggggaacacaacagtgaagatcaagtggaaacctcgaccgaaaatgtctcgatcctaccaaatgtatcatcacctatcgggatttatgcgacccccatttctgattgcagcacaccctatgacaaagttgctgcgccatcttataagccaaaaaaacgaacacgaaaacaattagtttcgaaaggaaagagaaagagacgaacagaaccaaagccgcgtgtggggaatacaaataacaacattcttgctcttctcaaaaattgcgtttgtgggagcaaaagcaaagaactcaacaacaaacaagcacgggaggttcagacagttgcggattacatgattgtgaatgattgccacgcattattacagcctcaacttaagaaatggcagaagaatttgtccagtgataagcacgccctcggattcccgcctttggaaaagagtgcgacagctgcggcgaaatacttcgaactactccagtctgagagacttcttaagtatagcctggaacaccgcatggcgctcatttctttttacttgatttatcttgaaatcgcccgtgaaatgagggataatgaagacctcggtgactacgagcctcgatctggagacgacagatttacaacaatggccaacgacaagatcctagcgaccatccacgggattaaagtacagaccatcagcaaggaagaaattgatcgtggtagagcaaggctgaacgagtttcatcgctggggcaaacgatggtggacgcttgcgagtggtgtcggtcttggagtactacttgtacccggtgaacagctcgctatggcaatgtgagtgattccgaaacaaaactagcttttcttccaatac
